(19) United States
(12) Patent Application Publication
(10) Pub. No.: US 2016/0348073 A1
(43) Pub. Date: Dec. 1, 2016

(54) MODIFIED T CELLS AND METHODS OF MAKING AND USING THE SAME

(71) Applicant: President and Fellows of Harvard College, Cambridge, MA (US)

(72) Inventors: Torsten B. Meissner, Somerville, MA (US); Kabungo Y. Mulumba, Cambridge, MA (US); Leonardo M.R. Ferreira, Cambridge, MA (US); Chad A. Cowan, Boston, MA (US)

(21) Appl. No.: 15/083,021

(22) Filed: Mar. 28, 2016

Related U.S. Application Data
(60) Provisional application No. 62/139,479, filed on Mar. 27, 2015.

(51) Int. Cl. C12N 5/0783; C12N 15/10; A61K 35/17; C12N 15/85

(52) U.S. Cl. CPC C12N 5/0638; C12N 15/85; C12N 15/102; A61K 35/17; A61K 2035/124

(57) ABSTRACT

Disclosed herein are modified primary human T cells and populations thereof comprising a genome in which the CTLA4, PD1, TCRA, TCRB, and/or B2M genes have been edited to generate an off-the-shelf universal CAR T cell from allogeneic healthy donors that can be administered to any patient while reducing or eliminating the risk of immune rejection or graft versus host disease, and which are not prone to T cell inhibition, and methods for allogeneic administration of such cells to reduce the likelihood that the cells will trigger a host immune response when the cells are administered to a subject in need of such cells.

### RELATED APPLICATIONS

[0001] This application claims the benefit of U.S. Provisional Application Ser. No. 62/139,479 filed on Mar. 27, 2015, the entire teachings of which are incorporated herein by reference.

### GOVERNMENT SUPPORT

[0002] This invention was made with government support under R01DK097768 awarded by the National Institutes of Health. The government has rights in the invention.

### BACKGROUND OF THE INVENTION

[0003] T cell therapy employing chimeric antigen receptors (CAR) represents a major breakthrough in cancer immunotherapy (e.g., adoptive immunotherapy) and as a new form of treatment for viral and fungal infections, among others. Several obstacles currently prevent the safe translation of CAR T therapies, such as the risk of autoreactivity of the endogenous T cell receptor (TCR), T cell inhibition by cancerous or infected cells, and the reliance on autologous T cell transplants.

### SUMMARY OF THE INVENTION

[0004] There is a need for modified T cells and methods of making and using such T cells that overcome autoreactivity of the endogenous TCR, T cell inhibition, as well empower the use of allogeneic T cells for CAR T therapies. The present invention is directed toward further solutions to address this need, in addition to having other desirable characteristics. The present invention utilizes genomic editing, such as a CRISPR and/or TALEN system, to remove the above obstacles. In a CRISPR/Cas system the Cas protein may be, for example, Cas9 or Cpf1. For example, to overcome autoreactivity work detailed herein designed and tested CRISPR/Cas guide RNAs (gRNAs) targeting the TCRa and TCRb chains and demonstrated high on-target activity and loss of TCR surface expression in Jurkat T cells and in primary human T cells. Due to the multiplexing capabilities of genomic editing, e.g., using the CRISPR/Cas9 or CRISPR/Cpf1 system, the TCRa and/or TCRb can also be targeted in combination with other molecules (e.g., B2M, CTLA4, PD-1) to overcome T cell inhibition and empower CAR T therapies. The compositions and methods of the present invention are suited for clinical translation and improve on existing and emerging T cell-based therapies (e.g., adoptive immunotherapy).

[0005] In some embodiments, the present inventions are directed to modified primary human T cells comprising a modified genome, the cells comprising a first genomic modification in which the cytotoxic T-lymphocyte-associated protein 4 (CTLA4) gene on chromosome 2 has been cleaved edited, e.g., to delete a first contiguous stretch of genomic DNA, thereby reducing or eliminating CTLA4 receptor surface expression and/or activity in the cell; a second genomic modification in which the programmed cell death 1 (PD1) gene on chromosome 2 has been cleaved or edited, e.g., to delete a second contiguous stretch of genomic DNA, thereby reducing or eliminating PD1 receptor surface expression and/or activity in the cell; (i) a third genomic modification in which the gene encoding the T cell receptor (TCR) alpha chain locus on chromosome 14 has been cleaved or edited, e.g., to delete a third contiguous stretch of genomic DNA, and/or (ii) a fourth genomic modification in which the gene encoding the TCR beta chain locus on chromosome 7 has been cleaved or edited, e.g., to delete a fourth contiguous stretch of genomic DNA, thereby reducing or eliminating TCR surface expression and/or activity in the cell; and a fifth genomic modification in which the β2-microglobulin (B2M) gene on chromosome 15 has been cleaved or edited, e.g., to delete a fifth contiguous stretch of genomic DNA, thereby reducing or eliminating B2M expression or activity and/or MHC Class I molecule surface expression and/or activity in the cell; and each cell optionally comprising: (i) at least one chimeric antigen receptor that specifically binds to an antigen or epitope of interest expressed on the surface of at least one of a damaged cell, a dysplastic cell, an infected cell, an immunogenic cell, an inflamed cell, a malignant cell, a metaplastic cell, a mutant cell, and combinations thereof, or an exogenous nucleic acid encoding the at least one chimeric antigen receptor, and/or (ii) at least one exogenous protein that modulates a biological effect of interest in an adjacent cell, tissue, or organ, or an exogenous nucleic acid encoding the protein.

[0006] In some embodiments, the present inventions are directed to modified primary human T cells comprising a modified genome, the cells comprising a first genomic modification in which the cytotoxic T-lymphocyte-associated protein 4 (CTLA4) gene on chromosome 2 has been edited to delete a first contiguous stretch of genomic DNA comprising an intron flanked by at least a portion of an adjacent upstream exon and at least a portion of an adjacent downstream exon, and the 3′ end of the genomic DNA upstream with respect to the 5′ end of the deleted first contiguous stretch of genomic DNA is covalently joined to the 5′ end of the genomic DNA downstream with respect to the 3′ end of the deleted first contiguous stretch of genomic DNA to result in a modified CTLA4 gene on chromosome 2 that lacks the first contiguous stretch of genomic DNA, thereby reducing or eliminating CTLA4 receptor surface expression and/or activity in the cell; and/or a second genomic modification in which the programmed cell death 1 (PD1) gene on chromosome 2 has been edited to delete a second contiguous stretch of genomic DNA comprising an intron flanked by at least a portion of an adjacent upstream exon and at least a portion of an adjacent downstream exon, and the 3′ end of the genomic DNA upstream with respect to the deleted second contiguous stretch of genomic DNA is covalently joined to the 5′ end of the genomic DNA downstream with respect to the 3′ end of the deleted second contiguous stretch of genomic DNA to result in a modified PD1 gene on chromosome 2 that lacks the second contiguous stretch of genomic DNA, thereby reducing or eliminating PD1 receptor surface expression and/or activity in the cell.

[0007] In some embodiments, the present inventions are directed to modified primary human T cells comprising a modified genome, the cells comprising a first genomic modification in which the cytotoxic T-lymphocyte-associated protein 4 (CTLA4) gene on chromosome 2 has been edited to delete a first contiguous stretch of genomic DNA, thereby reducing or eliminating CTLA4 receptor surface expression and/or activity in the cell, wherein the first contiguous stretch of genomic DNA has been deleted by contacting the cell with a Cas protein or a nucleic acid encoding the Cas protein and a first pair of ribonucleic acids having sequences selected from the group consisting of SEQ ID NOs: 1-195 and 797-3637; and/or a second genomic modification in which the programmed cell death 1 (PD1) gene on chromosome 2 has been edited to delete a second contiguous stretch of genomic DNA, thereby reducing or eliminating PD1 receptor surface expression and/or activity in the cell, wherein the second contiguous stretch of genomic DNA has been deleted by contacting the cell with the Cas protein or the nucleic acid encoding the Cas protein and a second pair of ribonucleic acids having sequences selected from the group consisting of SEQ ID NOs: 196-531 and 4047-8945.

[0008] In some embodiments, the first pair of ribonucleic acids comprises SEQ ID NO: 128 and SEQ ID NO: 72, and wherein the second pair of ribonucleic acids comprises SEQ ID NO: 462 and SEQ ID NO: 421.

[0009] In certain embodiments, the modified primary human T cells further comprise (i) a third genomic modification in which the gene encoding the T cell receptor (TCR) alpha chain locus on chromosome 14 has been edited to delete a third contiguous stretch of genomic DNA comprising at least a portion of a coding exon, and/or (ii) a fourth genomic modification in which the gene encoding the TCR beta chain locus on chromosome 7 has been edited to delete a fourth contiguous stretch of genomic DNA comprising at least a portion of a coding exon, thereby reducing or eliminating TCR surface expression and/or activity in the cell.

[0010] In some embodiments, the third contiguous stretch of genomic DNA has been deleted by contacting the cell with the Cas protein or the nucleic acid encoding the Cas protein and a third pair of ribonucleic acids having sequences selected from the group consisting of SEQ ID NOs: 532-609 and 9102-9545, and/or wherein the fourth contiguous stretch of genomic DNA has been deleted by contacting the cell with the Cas protein or the nucleic acid encoding the Cas protein and a fourth pair of ribonucleic acids having sequences selected from the group consisting of SEQ ID NOs: 610-765 and 9798-10532. In certain aspects, the third pair of ribonucleic acids comprises SEQ ID NO: 550 and SEQ ID NO: 573, and/or wherein the fourth pair of ribonucleic acids comprises SEQ ID NO: 657 and SEQ ID NO: 662.

[0011] In certain embodiments, the modified primary human T cells further comprise a fifth genomic modification in which the β2-microglobulin (B2M) gene on chromosome 15 has been edited to delete a fifth contiguous stretch of genomic DNA, thereby reducing or eliminating MHC Class I molecule surface expression and/or activity in the cell. In certain aspects, the fifth contiguous stretch of genomic DNA has been deleted by contacting the cell with the Cas protein or the nucleic acid encoding the Cas protein and a fifth pair of ribonucleic acids having sequences selected from the group comprises SEQ ID NOs: 766-780 and 10574-13257. In some embodiments, the fifth pair of ribonucleic acids comprises SEQ ID NO: 773 and SEQ ID NO: 778.

[0012] In some embodiments, the modified primary human T cells further comprise a chimeric antigen receptor or an exogenous nucleic acid encoding the chimeric antigen receptor. For example, the chimeric antigen receptor may specifically bind to an antigen or epitope of interest expressed on the surface of at least one of a damaged cell, a dysplastic cell, an infected cell, an immunogenic cell, an inflamed cell, a malignant cell, a metaplastic cell, a mutant cell, and combinations thereof.

[0013] In certain embodiments, the modified primary human T cells further comprise at least one exogenous protein that modulates a biological effect of interest in an adjacent cell, tissue, or organ, or an exogenous nucleic acid encoding the protein. In some aspects, the T cell is selected from the group consisting of cytotoxic T-cells, helper T-cells, memory T-cells, regulatory T-cells, tissue infiltrating lymphocytes, and combinations thereof. In certain aspects, the cell is obtained from a subject suffering from, being treated for, diagnosed with, at risk of developing, or suspected of having, a disorder selected from the group consisting of an autoimmune disorder, cancer, a chronic infectious disease, and graft versus host disease (GVHD).

[0014] Also disclosed are methods for producing a modified primary human T cell, the method comprising (a) editing the cytotoxic T-lymphocyte-associated protein 4 (CTLA4) gene on chromosome 2 in a primary human T cell to delete a first contiguous stretch of genomic DNA, thereby reducing or eliminating CTLA4 receptor surface expression and/or activity in the cell; (b) editing the programmed cell death 1 (PD1) gene on chromosome 2 in the cell to delete a second contiguous stretch of genomic DNA, thereby reducing or eliminating PD1 receptor surface expression and/or activity in the cell; (c)(i) editing the gene encoding the T cell receptor (TCR) alpha chain locus on chromosome 14 in the cell to delete a third contiguous stretch of genomic DNA, and/or (c)(ii) editing the gene encoding the TCR beta chain locus on chromosome 7 in the cell to delete a fourth contiguous stretch of genomic DNA, thereby reducing or eliminating TCR surface expression and/or activity in the cell; and (d) editing the β2-microglobulin (B2M) gene on chromosome 15 in the cell to delete a fifth contiguous stretch of genomic DNA, thereby reducing or eliminating MHC Class I molecule surface expression and/or activity in the cell; and optionally (e)(i) causing the cell to express at least one chimeric antigen receptor that specifically binds to an antigen or epitope of interest expressed on the surface of at least one of a damaged cell, a dysplastic cell, an infected cell, an immunogenic cell, an inflamed cell, a malignant cell, a metaplastic cell, a mutant cell, and combinations thereof, and/or (e)(ii) causing the cell to express at least one protein that modulates a biological effect of interest in an adjacent cell, tissue, or organ, wherein the editing in (a)-(d) comprises contacting the cell with a Cas protein or a nucleic acid encoding the Cas protein, and at least one first pair of guide RNA sequences to delete the first contiguous stretch of genomic DNA from the gene in (a), at least one second pair of guide RNA sequences to delete the second contiguous stretch of genomic DNA from the gene in (b), at least one third pair of guide RNA sequences to delete the third contiguous stretch of genomic DNA from the gene in (c)(i), and/or at least one fourth pair of guide RNA, sequences to delete the fourth contiguous stretch of genomic DNA from the gene in (c)(ii), and at least one fifth pair of guide RNA sequences to delete the fifth contiguous stretch of genomic DNA from the gene in (d).

[0015] Also disclosed herein are methods for producing a modified primary human T cell, the method comprising (a) editing the cytotoxic T-lymphocyte-associated protein 4 (CTLA4) gene on chromosome 2 in a primary human T cell to delete a first contiguous stretch of genomic DNA comprising an intron flanked by at least a portion of an adjacent upstream exon and at least a portion of an adjacent downstream exon, and the 3′ end of the genomic DNA upstream with respect to the 5′ end of the deleted first contiguous stretch of genomic DNA is covalently joined to the 5′ end of the genomic DNA downstream with respect to the 3′ end of the deleted first contiguous stretch of genomic DNA to result in a modified CTLA4 gene on chromosome 2 that lacks the first contiguous stretch of genomic DNA, thereby reducing or eliminating CTLA4 receptor surface expression and/or activity in the cell; and/or (b) editing the programmed cell death 1 (PD1) gene on chromosome 2 in a primary human T cell to delete a second contiguous stretch of genomic DNA comprising an intron flanked by at least a portion of an adjacent upstream exon and at least a portion of an adjacent downstream exon, and the 3′ end of the genomic DNA upstream with respect to the deleted second contiguous stretch of genomic DNA is covalently joined to the 5′ end of the genomic DNA downstream with respect to the 3′ end of the deleted second contiguous stretch of genomic DNA to result in a modified PD1 gene on chromosome 2 that lacks the second contiguous stretch of genomic DNA, thereby reducing or eliminating PD1 receptor surface expression and/or activity in the cell.

[0016] Also disclosed herein are methods for producing a modified primary human T cell, the method comprising (a) contacting a primary human T cell with a Cas protein or a nucleic acid encoding the Cas protein and a first pair of ribonucleic acids having sequences selected from the group consisting of SEQ ID NOs: 1-195 and 797-3637, thereby editing the cytotoxic T-lymphocyte-associated protein 4 (CTLA4) gene on chromosome 2 to delete a first contiguous stretch of genomic DNA, and reduce or eliminate CTLA4 receptor surface expression and/or activity in the cell; and/or (b) contacting a primary human T cell with the Cas protein or the nucleic acid encoding the Cas protein and a second pair of ribonucleic acids having sequences selected from the group consisting of SEQ ID NOs: 196-531 and 4047-8945, thereby editing the programmed cell death 1 (PD1) gene on chromosome 2 to delete a second contiguous stretch of genomic DNA, and reduce or eliminate PD1 receptor surface expression and/or activity in the cell.

[0017] In some aspects, the methods for producing a modified primary human T cell further comprise (c)(i) editing the gene encoding the T cell receptor (TCR) alpha chain locus on chromosome 14 in the cell to delete a third contiguous stretch of genomic DNA comprising at least a portion of a coding exon, and/or (c)(ii) editing the gene encoding the TCR beta chain locus on chromosome 7 in the cell to delete a fourth contiguous stretch of genomic DNA comprising at least a portion of a coding exon, thereby reducing or eliminating TCR surface expression and/or activity in the cell. In certain aspects, the editing in (c)(i) comprises contacting the cell with the Cas protein or the nucleic acid encoding the Cas protein and a third pair of ribonucleic acids having sequences selected from the group consisting of SEQ ID NOs: 532-609 and 9102-9750, and/or wherein the editing in (c)(ii) comprises contacting the cell with the Cas protein or the nucleic acid encoding the Cas protein and a fourth pair of ribonucleic acids having sequences selected from the group consisting of SEQ ID NOs: 610-765 and 9798-10532.

[0018] In some aspects, the methods for producing a modified primary human T cell further comprise (d) editing the β2-microglobulin (B2M) gene on chromosome 15 in the cell to delete a fifth contiguous stretch of genomic DNA, thereby reducing or eliminating MHC Class I molecule surface expression and/or activity in the cell. In certain aspects, the editing in (d) comprises contacting the cell with the Cas protein or the nucleic acid encoding the Cas protein and a fifth pair of ribonucleic acids having sequences selected from the group consisting of SEQ ID NOs: 766-780 and 10574-13257.

[0019] In certain aspects of the inventions disclosed herein, the first pair of ribonucleic acids comprises SEQ ID NO: 128 and SEQ ID NO: 72, and wherein the second pair of ribonucleic acids comprises SEQ ID NO: 462 and SEQ ID NO: 421. In certain aspects of the inventions disclosed herein, the third pair of ribonucleic acids comprises SEQ ID NO: 550 and SEQ ID NO: 573, and/or wherein the fourth pair of ribonucleic acids comprises SEQ ID NO: 657 and SEQ ID NO: 662. In certain aspects of the inventions disclosed herein, the fifth pair of ribonucleic acids comprises SEQ ID NO: 773 and SEQ ID NO: 778.

[0020] In some embodiments, the methods for producing a modified primary human T cell further comprise causing the cell to express at least one chimeric antigen receptor that specifically binds to an antigen or epitope of interest expressed on the surface of at least one of a damaged cell, a dysplastic cell, an infected cell, an immunogenic cell, an inflamed cell, a malignant cell, a metaplastic cell, a mutant cell, and combinations thereof.

[0021] In some embodiments, the methods for producing a modified primary human T cell further comprise causing the cell to express at least one protein that modulates a biological effect of interest in an adjacent cell, tissue, or organ when the cell is in proximity to the adjacent cell, tissue, or organ.

[0022] In certain aspects of the inventions disclosed herein, T cell is selected from the group consisting of cytotoxic T-cells, helper T-cells, memory T-cells, regulatory T-cells, tissue infiltrating lymphocytes, and combinations thereof. In certain aspects of the inventions disclosed herein, the cell is obtained from a subject suffering from, being treated for, diagnosed with, at risk of developing, or suspected of having, a disorder selected from the group consisting of an autoimmune disorder, cancer, a chronic infectious disease, and graft versus host disease (GVHD).

[0023] Also disclosed herein are methods of treating a patient in need thereof, the methods comprising (a)(i) administering a modified T cell according to any one of claims 1 to 15 to a patient in need of such cells; (a)(ii) administering a modified T cell produced according to the method of any one of claims 16 to 29 to a patient in need of such cells; or (a)(iii) administering a composition according to claim 30 to a patient in need of such cells. For example, the treatment may comprise adoptive immunotherapy.

[0024] In some embodiments, the method for treating a patient further comprises expanding the modified T cell prior to the step of administering. In some aspects, the patient is suffering from, being treated for, diagnosed with, at risk of developing, or suspected of having, a disorder selected from the group consisting of an autoimmune disorder, cancer, a chronic infectious disease, and graft versus host disease (GVHD).

[0025] Also disclosed herein are compositions comprising a chimeric nucleic acid, the chimeric nucleic acid comprising (a) a nucleic acid sequence encoding a Cas protein; and (b) at least one ribonucleic acid sequence selected from the group consisting of: (i) SEQ ID NOs: 1-195 and 797-3637; (ii) SEQ ID NOs: 196-531 and 4047-8945; (iii) SEQ ID NOs: 532-609 and 9102-9750; (iv) SEQ ID NOs: 610-765 and 9798-10532; (v) SEQ ID NOs: 766-780 and 10574-13257; and (vi) combinations of (i)-(v). For example, the pair of ribonucleic acid sequences in (b) is selected from the group consisting of; (i) SEQ ID NO: 128 and SEQ ID NO: 72; (ii) SEQ ID NO: 462 and SEQ ID NO: 421; (iii) SEQ ID NO: 550 and SEQ ID NO: 573; (iv) SEQ ID NO: 657 and SEQ ID NO: 662; (v) SEQ ID NO: 773 and SEQ ID NO: 778; and (vi) combinations of (i)-(v).

[0026] In some embodiments, the compositions comprising a chimeric nucleic acid further comprise a nucleic acid sequence encoding a detectable marker. In some embodiments, the compositions comprising a chimeric nucleic acid further comprise a promoter optimized for increased expression in human cells operably linked to the chimeric nucleic acid, wherein the promoter is selected from the group consisting of a Cytomegalovirus (CMV) early enhancer element and a chicken beta-actin promoter, a chicken beta-actin promoter, an elongation factor-1 alpha promoter, and a ubiquitin promoter.

[0027] In some aspects, the Cas protein comprises a Cas9 protein or a functional portion thereof. For example, the nucleic acid encoding Cas protein comprises a messenger RNA (mRNA) encoding Cas9 protein. In certain aspects, the mRNA comprises at least one modified nucleotide selected from the group consisting of pseudouridine, 5-methylcytodine, 2-thio-uridine, 5-methyluridine-5′-triphosphate, 4-thiouridine-5′-triphosphate, 5,6-dihydrouridine-5′-triphosphate, and 5-azauridine-5′-triphosphate. In certain aspects of the invention, the chimeric nucleic acid comprises at least one modified nucleotide selected from the group consisting of pseudouridine, 5-methylcytodine, 2-thio-uridine, 5-methyluridine-5′-triphosphate, 4-thiouridine-5′-triphosphate, 5,6-dihydrouridine-5′-triphosphate, and 5-azauridine-5′-triphosphate.

[0028] Also disclosed herein are methods for altering a target CTLA4 polynucleotide sequence in a cell comprising contacting the CTLA4 polynucleotide sequence with a clustered regularly interspaced short palindromic repeats-associated (Cas) protein and from one to two ribonucleic acids, wherein the ribonucleic acids direct Cas protein to and hybridize to a target motif of the target CTLA4 polynucleotide sequence, wherein the target CTLA4 polynucleotide sequence is cleaved, and wherein at least one of the one to two ribonucleic acids are selected from the group consisting of SEQ ID NOs: 1-195 and 797-3637. In certain aspects, each of the one to two ribonucleic acids is selected from the group consisting of SEQ ID NOs: 1-195 and 797-3637. For example, the two ribonucleic acids may comprise SEQ ID NO: 128 and SEQ ID NO: 72.

[0029] Also disclosed herein are methods for altering a target PD1 polynucleotide sequence in a cell comprising contacting the PD1 polynucleotide sequence with a clustered regularly interspaced short palindromic repeats-associated (Cas) protein and from one to two ribonucleic acids, wherein the ribonucleic acids direct Cas protein to and hybridize to a target motif of the target PD1 polynucleotide sequence, wherein the target PD1 polynucleotide sequence is cleaved, and wherein at least one of the one to two ribonucleic acids are selected from the group consisting of SEQ ID NOs: 196-531 and 4047-8945. In certain aspects, each of the one to two ribonucleic acids is selected from the group consisting of SEQ ID NOs: 196-531 and 4047-8945. For example, the two ribonucleic acids may comprise SEQ ID NO: 462 and SEQ ID NO: 421.

[0030] Also disclosed herein are methods for altering a target TCRA polynucleotide sequence in a cell comprising contacting the TCRA polynucleotide sequence with a clustered regularly interspaced short palindromic repeats-associated (Cas) protein and from one to two ribonucleic acids, wherein the ribonucleic acids direct Cas protein to and hybridize to a target motif of the target TCRA polynucleotide sequence, wherein the target TCRA polynucleotide sequence is cleaved, and wherein at least one of the one to two ribonucleic acids are selected from the group consisting of SEQ ID NOs: 532-609 and 9102-9750. In certain aspects, each of the one to two ribonucleic acids is selected from the group consisting of SEQ ID NOs: 532-609 and 9102-9750. For example, the two ribonucleic acids may comprise SEQ ID NO: 550 and SEQ ID NO: 573.

[0031] Also disclosed herein are methods for altering a target TCRB polynucleotide sequence in a cell comprising contacting the TCRB polynucleotide sequence with a clustered regularly interspaced short palindromic repeats-associated (Cas) protein and from one to two ribonucleic acids, wherein the ribonucleic acids direct Cas protein to and hybridize to a target motif of the target TCRB polynucleotide sequence, wherein the target TCRB polynucleotide sequence is cleaved, and wherein at least one of the one to two ribonucleic acids are selected from the group consisting of SEQ ID NOs: 610-765 and 9798-10532. In certain aspects, each of the one to two ribonucleic acids is selected from the group consisting of SEQ ID NOs: 610-765 and 9798-10532. For example, the two ribonucleic acids may comprise SEQ ID NO: 657 and SEQ ID NO: 662.

[0032] In some embodiments, the present inventions are directed to modified primary human T cells, each cell comprising a modified genome, the cells comprising (a) a first genomic modification in which the cytotoxic T-lymphocyte-associated protein 4 (CTLA4) gene on chromosome 2 has been edited to reduce or eliminate CTLA4 receptor surface expression and/or activity in the cell by contacting the cell with a Cas protein or a nucleic acid sequence encoding the Cas protein and a ribonucleic acid having a sequence selected from the group consisting of SEQ ID NOs: 3638-4046; and/or (b) a second genomic modification in which the programmed cell death 1 (PD1) gene on chromosome 2 has been edited to reduce or eliminate PD1 receptor surface expression and/or activity in the cell by contacting the cell with the Cas protein or the nucleic acid encoding the Cas protein and a second ribonucleic acid having a sequence selected from the group consisting of SEQ ID NOs: 8946-9101.

[0033] In some embodiments, the modified primary human T cells further comprise (c)(i) a third genomic modification in which the gene encoding the T cell receptor (TCR) alpha chain locus on chromosome 14 has been edited, and/or (c)(ii) a fourth genomic modification in which the gene encoding the TCR beta chain locus on chromosome 7 has been, thereby reducing or eliminating TCR surface expression and/or activity in the cell. In some aspects, the third contiguous stretch of genomic DNA has been edited by contacting the cell with the Cas protein or the nucleic acid sequence encoding the Cas protein and a third ribonucleic acid having a sequence selected from the group consisting of SEQ ID NOs: 9751-9797, and/or wherein the fourth contiguous stretch of genomic DNA has been edited by contacting the cell with the Cas protein or the nucleic acid sequence encoding the Cas protein and a fourth ribonucleic acid having a sequence selected from the group consisting of SEQ ID NOs: 10533-10573.

[0034] In some embodiments, the modified primary human T cells further comprise (d) a fifth genomic modification in which the β2-microglobulin (B2M) gene on chromosome 15 has been edited, thereby reducing or eliminating MHC Class I molecule surface expression and/or activity in the cell. In certain aspects, the fifth contiguous stretch of genomic DNA has been edited by contacting the cell with the Cas protein or the nucleic acid sequence encoding the Cas protein and a fifth ribonucleic acid having a sequence selected from the group consisting of SEQ ID NOs: 13258-13719.

[0035] In some aspects, the modified primary human T cells further comprise a chimeric antigen receptor or an exogenous nucleic acid encoding the chimeric antigen receptor. In certain aspects, the chimeric antigen receptor specifically binds to an antigen or epitope of interest expressed on the surface of at least one of a damaged cell, a dysplastic cell, an infected cell, an immunogenic cell, an inflamed cell, a malignant cell, a metaplastic cell, a mutant cell, and combinations thereof.

[0036] In some aspects, the modified primary human T cells further comprise at least one exogenous protein that modulates a biological effect of interest in an adjacent cell, tissue, or organ, or an exogenous nucleic acid encoding the protein.

[0037] Also disclosed herein are methods for producing a modified primary human T cell, the methods comprising (a) contacting a primary human T cell with a Cas protein or a nucleic acid sequence encoding the Cas protein and a first ribonucleic acid having a sequence selected from the group consisting of SEQ ID NOs: 3638-4046, thereby editing the cytotoxic T-lymphocyte-associated protein 4 (CTLA4) gene on chromosome 2 to reduce or eliminate CTLA4 receptor surface expression and/or activity in the cell; and/or (b) contacting a primary human T cell with the Cas protein or the nucleic acid sequence encoding the Cas protein and a second ribonucleic acid having a sequence selected from the group consisting of SEQ ID NOs: 8946-9101, thereby editing the programmed cell death 1 (PD1) gene on chromosome 2 to reduce or eliminate PD1 receptor surface expression and/or activity in the cell.

[0038] In some embodiments, the methods further comprise (c)(i) editing the gene encoding the T cell receptor (TCR) alpha chain locus on chromosome 14 in the cell, and/or (c)(ii) editing the gene encoding the TCR beta chain locus on chromosome 7 in the cell, thereby reducing or eliminating TCR surface expression and/or activity in the cell. In certain aspects, the editing in (c)(i) comprises contacting the cell with the Cas protein or the nucleic acid encoding the Cas protein and a third ribonucleic acid having a sequence selected from the group consisting of SEQ ID NOs: 9751-9797, and/or wherein the editing in (c)(ii) comprises contacting the cell with the Cas protein or the nucleic acid encoding the Cas protein and a fourth ribonucleic acid having a sequence selected from the group consisting of SEQ ID NOs: 10533-10573.

[0039] In some embodiments, the methods further comprise (d) editing the β2-microglobulin (B2M) gene on chromosome 15 in the cell, thereby reducing or eliminating MHC Class I molecule surface expression and/or activity in the cell. In certain aspects, the editing in (d) comprises contacting the cell with the Cas protein or the nucleic acid encoding the Cas protein and a fifth ribonucleic acid having a sequence selected from the group consisting of SEQ ID NOs: 13258-13719.

[0040] In some embodiments, the methods further comprise causing the cell to express at least one chimeric antigen receptor that specifically binds to an antigen or epitope of interest expressed on the surface of at least one of a damaged cell, a dysplastic cell, an infected cell, an immunogenic cell, an inflamed cell, a malignant cell, a metaplastic cell, a mutant cell, and combinations thereof.

[0041] In some embodiments, the methods disclosed herein further comprise causing the cell to express at least one protein that modulates a biological effect of interest in an adjacent cell, tissue, or organ when the cell is in proximity to the adjacent cell, tissue, or organ.

[0042] In certain embodiments of the inventions disclosed herein, the T cell is selected from the group consisting of cytotoxic T-cells, helper T-cells, memory T-cells, regulatory T-cells, tissue infiltrating lymphocytes, and combinations thereof. In certain embodiments of the inventions disclosed herein, the cell is obtained from a subject suffering from, being treated for, diagnosed with, at risk of developing, or suspected of having, a disorder selected from the group consisting of an autoimmune disorder, cancer, a chronic infectious disease, and graft versus host disease (GVHD).

[0043] Also disclosed herein are compositions comprising the cells of the inventions disclosed herein, or the cells produced in accordance with the methods of the inventions disclosed herein.

[0044] Also disclosed herein are compositions comprising a chimeric nucleic acid, the chimeric nucleic acid comprising: (a) a nucleic acid sequence encoding a Cas protein; (b) a ribonucleic acid sequence selected from the group consisting of: (i) SEQ ID NOs: 3638-4046; (ii) SEQ ID NOs: 8946-9101; (iii) SEQ ID NOs: 9751-9797; (iv) SEQ ID NOs: 10533-10573; (v) SEQ ID NOs: 13258-13719; and (vi) combinations of (i)-(v).

[0045] In some embodiments, the chimeric nucleic acid further comprises a nucleic acid sequence encoding a detectable marker. In some aspects of the inventions disclosed herein, the Cas protein comprises a Cpf1 protein or a functional portion thereof. For example, the nucleic acid encoding Cas protein may comprise a messenger RNA (mRNA) encoding Cpf1 protein. In certain aspects, the mRNA comprises at least one modified nucleotide selected from the group consisting of pseudouridine, 5-methylcytodine, 2-thio-uridine, 5-methyluridine-5′-triphosphate, 4-thiouridine-5′-triphosphate, 5,6-dihydrouridine-5′-triphosphate, and 5-azauridine-5′-triphosphate.

[0046] In some embodiments, the chimeric nucleic acid comprises at least one modified nucleotide selected from the group consisting of pseudouridine, 5-methylcytodine, 2-thio-uridine, 5-methyluridine-5′-triphosphate, 4-thiouridine-5′-triphosphate, 5,6-dihydrouridine-5′-triphosphate, and 5-azauridine-5′-triphosphate.

[0047] Also disclosed herein are methods for altering a target CTLA4 polynucleotide sequence in a cell, the methods comprising contacting the CTLA4 polynucleotide sequence with a clustered regularly interspaced short palindromic repeats-associated (Cas) protein and a ribonucleic acid, wherein the ribonucleic acid directs Cas protein to and hybridizes to a target motif of the target CTLA4 polynucleotide sequence, wherein the target CTLA4 polynucleotide sequence is cleaved, and wherein the ribonucleic acid is selected from the group consisting of SEQ ID NOs: 3638-4046.

[0048] Also disclosed herein are methods for altering a target PD1 polynucleotide sequence in a cell, the methods comprising contacting the PD1 polynucleotide sequence with a clustered regularly interspaced short palindromic repeats-associated (Cas) protein and a ribonucleic acid, wherein the ribonucleic acid directs Cas protein to and hybridizes to a target motif of the target PD1 polynucleotide sequence, wherein the target PD1 polynucleotide sequence is cleaved, and wherein the ribonucleic acid is selected from the group consisting of SEQ ID NOs: 8946-9101.

[0049] Also disclosed are methods for altering a target TCRA polynucleotide sequence in a cell, the methods comprising contacting the TCRA polynucleotide sequence with a clustered regularly interspaced short palindromic repeats-associated (Cas) protein and a ribonucleic acid, wherein the ribonucleic acid directs Cas protein to and hybridizes to a target motif of the target TCRA polynucleotide sequence, wherein the target TCRA polynucleotide sequence is cleaved, and wherein the ribonucleic acid is selected from the group consisting of SEQ ID NOs: 9751-9797.

[0050] Also disclosed herein are methods for altering a target TCRB polynucleotide sequence in a cell, the methods comprising contacting the TCRB polynucleotide sequence with a clustered regularly interspaced short palindromic repeats-associated (Cas) protein and a ribonucleic acid, wherein the ribonucleic acid directs Cas protein to and hybridizes to a target motif of the target TCRB polynucleotide sequence, wherein the target TCRB polynucleotide sequence is cleaved, and wherein the ribonucleic acid is selected from the group consisting of SEQ ID NOs: 10533-10573.

[0051] The above discussed, and many other features and attendant advantages of the present inventions will become better understood by reference to the following detailed description of the invention.

### BRIEF DESCRIPTION OF THE DRAWINGS

[0052] These and other characteristics of the present invention will be more fully understood by reference to the following detailed description in conjunction with the attached drawings. The patent or application file contains at least one drawing executed in color. Copies of this patent or patent application publication with color drawings will be provided by the Office upon request and payment of the necessary fee.

[0053] FIG. 1 is a schematic representation of adoptive immunotherapy using Tumor Infiltrating Lymphocytes (TILs). T cells are isolated from tumors, expanded ex-vivo and subsequently re-infused into the patient to target the tumor cells. Since the tumor environment does not support sufficient T cell proliferation, this method enables T cells to be activated and to proliferate ex-vivo before being reintroduced to mount an immune attack on the tumor (Restifo et al., 2012).

[0054] FIG. 2 is a schematic representation of the three generations of CAR T cells. Shown in green are the tumor-associated antigen (TAA)-binding domains that determine antigen specificity. The intracellular domain incorporates different aspects) of the TCR transduction machinery: (CD3 ζ chain/ZAP70), blue (CD28/PI3K) and yellow (4-1BB or OX40/TRAF) (Adapted from Casucci and Bondanza, 2011).

[0055] FIG. 3 is a schematic representation of T cell activation and inhibitory mechanisms. Dashed arrows indicate T cell activation through MHC-TCR and CD28-B7 interactions. Solid arrows represent inhibitory actions mediated through CTLA4 and PD1 on T cells. B7-1 and B7-2 are CD80 and CD86, respectively (adapted from Drake et al, C. G, 2014).

[0056] FIG. 4 shows an exemplary amino acid sequence of a Cas protein. Yellow highlights indicate Ruv-C-like domain. Underlining indicates HNH nuclease domain.

[0057] FIG. 5 shows exemplary gRNA sequences useful for targeting the CTLA4 gene using Cas9. The gRNAs described in the experimental examples are identified in red text.

[0058] FIG. 6 shows exemplary gRNA sequences useful for targeting the PD1 gene using Cas9. The gRNAs described in the experimental examples are identified in red text.

[0059] FIG. 7 shows exemplary gRNA sequences useful for targeting the TCRalpha locus using Cas9. The gRNAs described in the experimental examples are identified in red text.

[0060] FIG. 8 shows exemplary gRNA sequences useful for targeting the human TCRbeta locus using Cas9. The gRNAs described in the experimental examples are identified in red text.

[0061] FIG. 9 shows exemplary gRNA sequences useful for targeting and editing the human B2M gene using Cas9.

[0062] FIG. 10 demonstrates an exemplary TCR targeting strategy of the present invention. FIG. 10 is a schematic illustration depicting the location of the CRISPR gRNAs targeting the first coding exons of the TCRalpha and TCRbeta chains, respectively.

[0063] FIG. 11A and FIG. 11B demonstrate deletion of T cell receptor in Jurkat T cells. FIG. 11A depicts the results of a FACS analysis employing an anti-CD3 antibody, which reveals successful TCR deletion in Jurkat T cells that stably express the Cas9 nuclease. FIG. 11B shows the results of a SURVEYOR™ assay confirming cutting at the TCRa and TCRb loci.

[0064] FIG. 12A and FIG. 12B demonstrate TCR Deletion in Primary Human CD3+ T Cells. FIG. 12A shows the results of a SURVEYOR™ assay demonstrating CRISPR cutting at the TCRa and TCRb loci in CD3+ T cells obtained from two independent donors. FIG. 12B shows the loss of TCR surface expression demonstrated by FACS analysis.

[0065] FIG. 13A, FIG. 13B, and FIG. 13C demonstrate an exemplary PD-1 locus targeting strategy of the present invention. FIG. 13A is a schematic representation of the PD-1 targeting strategy. FIG. 13B demonstrates that the double CRISPR strategy results in cutting by both CRISPRs targeting the PD-1 locus in HEK293T cells. FIG. 13C is a schematic representation of sequencing, which confirmed the predicted deletion in the PD-1 locus after transfection of two CRISPRs targeting the PD-1 gene (PDCD1) as shown with reference to SEQ ID NOS: 793 and 794.

[0066] FIG. 14A and FIG. 14B demonstrate the loss of PD-1 expression in Jurkat T cells. FIG. 14A shows the results of FACS analysis, demonstrating the loss of PD-1 expression in activated Jurkat T cells. FIG. 14B shows the results of a SURVEYOR™ assay confirming cutting at the PD-1 locus.

[0067] FIG. 15A, FIG. 15B and FIG. 15C demonstrate an exemplary CTLA4 locus targeting strategy of the present invention. FIG. 15A is a schematic representation of the CTLA4 targeting strategy. FIG. 15B demonstrates that the double CRISPR strategy results in cutting by both CRISPRs targeting the CTLA4 locus in HEK293T cells. FIG. 15C is a schematic representation of sequencing, which confirmed the predicted deletion in the CTLA4 locus after transfection of two CRISPRs targeting the CTLA4 gene (CTLA4) as shown with reference to SEQ ID NOS: 795 and 796.

[0068] FIG. 16A and FIG. 16B demonstrate cutting at the CTLA-4 locus in Jurkat T cells. FIG. 16A demonstrates that the double CRISPR strategy results in cutting by both CRISPRs targeting the CTLA4 locus in Jurkat T cells. FIG. 16B shows the results of a SURVEYOR™ assay, demonstrating successful cutting by both CTLA4 CRISPRs in Jurkat T cells.

[0069] FIG. 17 shows exemplary gRNA sequences useful for targeting the CTLA4 gene using Cpf1.

[0070] FIG. 18 shows exemplary gRNA sequences useful for targeting the PD1 gene using Cpf1.

[0071] FIG. 19 shows exemplary gRNA sequences useful for targeting the TCRalpha locus using Cpf1.

[0072] FIG. 20 shows exemplary gRNA sequences useful for targeting the human TCRbeta locus using Cpf1.

[0073] FIG. 21 shows exemplary gRNA sequences useful for targeting and editing the human B2M gene using Cpf1.

[0074] FIG. 22 demonstrates B2M deletion efficiencies of selected guides in 293T cells. Arrows on the Surveyor assays show nuclease cleavage bonds.

[0075] FIG. 23 demonstrates a comparison of B2M surface expression in 293T cells when transfected with AsCpf1 and guide crB2M.

[0076] FIG. 24 demonstrates a comparison of B2M surface expression in 293T cells when transfected with LbCpf1 and guide crB2M.

[0077] FIG. 25 depicts Cpf1 crRNA design and cloning information.

[0078] FIG. 26A, FIG. 26B, FIG. 26C, FIG. 26D, FIG. 26E, FIG. 26F, and FIG. 26G demonstrate generation and characterization of B2M KO JEG3 cells using TALENs. FIG. 26A depicts a design of B2M TALEN and induced mutations. FIG. 26B depicts an analysis of B2M at the transcript and protein levels. FIG. 26C demonstrates an analysis of B2M at the surface expression level. FIG. 26D demonstrates that ΔB2M clones are devoid of MHC-I surface expression. FIG. 26E demonstrates that ΔB2M clones are devoid of HLA-G surface expression.

[0079] FIG. 26F demonstrates that ΔB2M clones are devoid of HLA-C surface expression. FIG. 26G demonstrates that ΔB2M clones are devoid of HLA-E surface expression.

[0080] The patent or application file contains at least one drawing executed in color. Copies of this patent or patent application publication with color drawings will be provided by the Office upon request and payment of the necessary fee.

### DETAILED DESCRIPTION OF THE INVENTION

[0081] T cell therapy is emerging as a major breakthrough in cancer immunotherapy and currently there are several clinical trials using modified T cells primarily in the treatment of B cell malignancies. T cells can be genetically modified to express tumor-specific chimeric antigen receptors (CAR) with specificity derived from the variable domains of a monoclonal antibody, thus focusing immunoreactivity toward the tumor in a major histocompatibility complex (MHC) non-restricted manner.

[0082] Despite these early successes, there are several obstacles to existing CAR T therapies. The predominant roadblock is the continuous presence of the endogenous T cell receptor (TCR), which prevents allotransplantation of CAR T cells, and even if the cells are given back to the same patient may result in autoimmune attack if the cells are cross-reactive with self-antigen, when administered in high dose to a patient. The second obstacle in T cell therapy is that tumors and viruses have evolved mechanisms to suppress T cells by exploiting critical checkpoint regulators of T cell activity. The present invention harnesses the potential of genetic editing systems, such as the CRISPR/Cas or TALEN systems, to overcome the aforementioned roadblocks that prevent the safe translation of this new therapeutic option into the clinic. In particular, work described herein demonstrates the feasibility of generating off-the-shelf universal CAR T cells from allogeneic healthy donors that can be administered to any patient without the risk of immune rejection or graft versus host disease (GvHD) and which are not prone to T cell inhibition. Moreover, the work described herein demonstrates that it is feasible to develop CRISPR guide sequences (gRNAs) that efficiently target the endogenous TCR, as well as critical checkpoint regulators of T cell activity. Work described herein provides gRNAs designed and tested to: (1) prevent autoreactivity by targeting the genes encoding the TCR alpha and beta chains; (2) break down the allobarrier by targeting the TCR and B2M genes; and/or (3) overcome autoreactivity by targeting the checkpoint inhibitors PD-1 and CTLA4.

[0083] The present invention contemplates altering target polynucleotide sequences in any manner which is available to the skilled artisan, for example, utilizing a TALEN or a CRISPR/Cas system. Such CRISPR/Cas systems can employ a variety of Cas proteins (Haft et al. PLoS Comput Biol. 2005; 1(6)e60). In some embodiments, the CRISPR/Cas system is a CRISPR type I system. In some embodiments, the CRISPR/Cas system is a CRISPR type II system. In some embodiments, the CRISPR/Cas system is a CRISPR type V system. It should be understood that although examples of methods utilizing CRISPR/Cas (e.g., Cas9 and Cpf1) and TALEN are described in detail herein, the invention is not limited to the use of these methods/systems. Other methods of targeting polynucleotide sequences to reduce or ablate expression in target cells known to the skilled artisan can be utilized herein.

[0084] According to methods of the present invention, one or more target polynucleotide sequence in a cell are altered, e.g., modified or cleaved. The present invention contemplates altering target polynucleotide sequences in a cell for any purpose but particularly such that the expression or activity of the encoded product is reduced or eliminated. In some embodiments, the target polynucleotide sequence in a cell is altered to produce a mutant cell. As used herein, a “mutant cell” refers to a cell with a resulting genotype that differs from its original genotype. In some instances, a “mutant cell” exhibits a mutant phenotype, for example when a normally functioning gene is altered using the CRISPR/Cas systems of the present invention. In other instances, a “mutant cell” exhibits a wild-type phenotype, for example when a CRISPR/Cas system is used to correct a mutant genotype. In some embodiments, the target polynucleotide sequence in a cell is altered to correct or repair a genetic mutation (e.g., to restore a normal phenotype to the cell). In some embodiments, the target polynucleotide sequence in a cell is altered to induce a genetic mutation (e.g., to disrupt the function of a gene or genomic element).

[0085] In some embodiments, the alteration is an indel. As used herein, “indel” refers to a mutation resulting from an insertion, deletion, or a combination thereof. As will be appreciated by those skilled in the art, an indel in a coding region of a genomic sequence will result in a frameshift mutation, unless the length of the indel is a multiple of three. In some embodiments, the alteration is a point mutation. As used herein, “point mutation” refers to a substitution that replaces one of the nucleotides. A CRISPR/Cas system can be used to induce an indel of any length or a point mutation in a target polynucleotide sequence.

[0086] In some embodiments, the alteration results in a knock out of the target polynucleotide sequence or a portion thereof. For example, knocking out a target polynucleotide sequence in a cell can be performed in vitro, in vivo or ex vivo for both therapeutic and research purposes. Knocking out a target polynucleotide sequence in a cell can be useful for treating or preventing a disorder associated with expression of the target polynucleotide sequence (e.g., by knocking out a mutant allele in a cell ex vivo and introducing those cells comprising the knocked out mutant allele into a subject). As used herein, “knock out” includes deleting all or a portion of the target polynucleotide sequence in a way that interferes with the function of the target polynucleotide sequence or its expression product.

[0087] In some embodiments, the alteration results in reduced expression of the target polynucleotide sequence. The terms “decrease,” “reduced,” “reduction,” and “decrease” are all used herein generally to mean a decrease by a statistically significant amount. However, for avoidance of doubt, “decreased,” “reduced,” “reduction,” “decrease” includes a decrease by at least 10% as compared to a reference level, for example a decrease by at least about 20%, or at least about 30%, or at least about 40%, or at least about 50%, or at least about 60%, or at least about 70%, or at least about 80%, or at least about 90% or up to and including a 100% decrease (i.e. absent level as compared to a reference sample), or any decrease between 10-100% as compared to a reference level.

[0088] The terms “increased,” “increase” or “enhance” or “activate” are all used herein to generally mean an increase by a statically significant amount; for the avoidance of any doubt, the terms “increased”, “increase” or “enhance” or “activate” means an increase of at least 10% as compared to a reference level, for example an increase of at least about 20%, or at least about 30%, or at least about 40%, or at least about 50%, or at least about 60%, or at least about 70%, or at least about 80%, or at least about 90% or up to and including a 100% increase or any increase between 10-100% as compared to a reference level, or at least about a 2-fold, or at least about a 3-fold, or at least about a 4-fold, or at least about a 5-fold or at least about a 10-fold increase, or any increase between 2-fold and 10-fold or greater as compared to a reference level.

[0089] The term “statistically significant” or “significantly” refers to statistical significance and generally means a two standard deviation (2SD) below normal, or lower, concentration of the marker. The term refers to statistical evidence that there is a difference. It is defined as the probability of making a decision to reject the null hypothesis when the null hypothesis is actually true. The decision is often made using the p-value.

[0090] In some embodiments, the alteration is a homozygous alteration. In some embodiments, the alteration is a heterozygous alteration.

[0091] In some embodiments, the alteration results in correction of the target polynucleotide sequence from an undesired sequence to a desired sequence. CRISPR/Cas systems can be used to correct any type of mutation or error in a target polynucleotide sequence. For example, CRISPR/Cas systems can be used to insert a nucleotide sequence that is missing from a target polynucleotide sequence due to a deletion. CRISPR/Cas systems can also be used to delete or excise a nucleotide sequence from a target polynucleotide sequence due to an insertion mutation. In some instances, CRISPR/Cas systems can be used to replace an incorrect nucleotide sequence with a correct nucleotide sequence (e.g., to restore function to a target polynucleotide sequence that is impaired due to a loss of function mutation, i.e., a SNP).

[0092] CRISPR/Cas systems can alter target polynucleotides with surprisingly high efficiency. In certain embodiments, the efficiency of alteration is at least about 5%. In certain embodiments, the efficiency of alteration is at least about 10%. In certain embodiments, the efficiency of alteration is from about 10% to about 80%. In certain embodiments, the efficiency of alteration is from about 30% to about 80%. In certain embodiments, the efficiency of alteration is from about 50% to about 80%. In some embodiments, the efficiency of alteration is greater than or equal to about 80%. In some embodiments, the efficiency of alteration is greater than or equal to about 85%. In some embodiments, the efficiency of alteration is greater than or equal to about 90%, about 91%, about 92%, about 93%, about 94%, about 95%, about 96%, about 97%, about 98%, or about 99%. In some embodiments, the efficiency of alteration is equal to about 100%.

[0093] CRISPR/Cas systems can be used to alter any target polynucleotide sequence in a cell. Those skilled in the art will readily appreciate that desirable target polynucleotide sequences to be altered in any particular cell may correspond to any genomic sequence for which expression of the genomic sequence is associated with a disorder or otherwise facilitates entry of a pathogen into the cell. For example, a desirable target polynucleotide sequence to alter in a cell may be a polynucleotide sequence corresponding to a genomic sequence which contains a disease-associated single polynucleotide polymorphism (SNP). In such example, CRISPR/Cas systems can be used to correct the disease associated SNP in a cell by replacing it with a wild-type allele. As another example, a polynucleotide sequence of a target gene which is responsible for entry or proliferation of a pathogen into a cell may be a suitable target for deletion or insertion to disrupt the function of the target gene to prevent the pathogen from entering the cell or proliferating inside the cell.

[0094] In some embodiments, the target polynucleotide sequence is a genomic sequence. In some embodiments, the target polynucleotide sequence is a human genomic sequence. In some embodiments, the target polynucleotide sequence is a mammalian genomic sequence. In some embodiments, the target polynucleotide sequence is a vertebrate genomic sequence.

[0095] Cytotoxic T-Lymphocyte-Associated Protein 4 (CTLA4)

[0096] In some embodiments, the target polynucleotide sequence is CTLA4, or a homologs ortholog, or variant thereof (Gene ID: 1493, also known as CD; GSE; GRD4; ALPS5; CD152; CTLA-4; IDDM12; CELIAC3). An exemplary CTLA4 human target polynucleotide sequence is shown in Table 1 below (NG_011502.1 RefSeqGene; SEQ ID NO: 782).

TABLE 1
Exemplary human CTLA4 target polynucleotide sequence

| | |
|---|---|
| 1 | cttctgtgtg tgcacatgtg taatacatat ctgggatcaa agctatctat ataaagtcct |
| 61 | tgattctgtg tgggttcaaa cacatttcaa agcttcagga tcctgaaagg ttttgctcta |
| 121 | cttcctgaag acctgaacac cgctcccata aagccatggc ttgccttgga tttcagcggc |
| 181 | acaaggctca gctgaacctg gctaccagga cctggccctg cactctcctg ttttttcttc |
| 241 | tcttcatccc tgtcttctgc aaaggtgagt gagacttttg gagcatgaag atggaggagg |
| 301 | tgtttctcct acctgggttt catttgtttc agcagtcaaa ggcagtgatt tatagcaaag |
| 361 | ccagaagtta aaggtaaaac tccaatctgg cttggctggc tctgtattcc agggccagca |
| 421 | gggagcagtt gggcggcagc aaataaggca aagagatagc tcagaacaga gcgccaggta |
| 481 | tttagtaggg gcttcatgaa tgcatgtgag ttggtttagt agagagacac aggcaatttc |
| 541 | agacccttct atgagactgg aagtgattta agagggaaag gatagccata gtcctgaata |
| 601 | catttgagct gggtttcagg atgagctcac aagttccttt aaaaaaaatt gacttaagca |
| 661 | aatcctggga agagtttttt tgctatacaa ttcaaggttt taaggtcctc ggattcatat |
| 721 | actttataaa tgaattagcc agcttgttta aaatgtaggg aaattgtggg aagaatgcct |
| 781 | tctttactta attcaaggtt ttaaggttct cttaatcaat tctactagct aattagccaa |
| 841 | ttatttaaaa ataaaagttt gaaattgcca aaaaaaaaag acaaggaaaa ggaaagaaag |
| 901 | aaagccacca gtctgtttgg catacaatac ttaattgttg cctgacctac gtgtgggttt |
| 961 | cagatgcaga tcctcagttt tcagctcttc agagactgac accaggtttg ttacacggct |
| 1021 | taaaatgatg agtatatcca ttgaatctca accttatctc tctctagacc ttcttggtta |
| 1081 | agaaaccatg tagtttgtat gaagtaggta ctcaaaagat atttgatgat ttaattttta |
| 1141 | ctggagaaga aatattcata tatgttttct tatttttaca tgttttaaat atgtaaagat |
| 1201 | taaataaaca ctcttagaag tatttaaatt tcctaaagta aatttatctc aaccagtaac |
| 1261 | aggaccctcc caatactgga aagttgagtg tgaccgcatt tagtggtgat gagtgtgagc |
| 1321 | ttgcttgggg agagggcagg acatttagga tttcttaagc ttagagtcaa tacaataaag |
| 1381 | attattgagt gctcacttgg gtgggctata atcactgctc acaggagttc atgaaccaca |
| 1441 | agtaaaagag tgaggagata tgattagctc acaaataact ttaatacaga gcagaaagta |
| 1501 | atgaactact gcaatggagt tatcacagtg ctaaggatgc tcagagggca tctctgatag |
| 1561 | gcagaggtga gggttaggga aggaagctgt agtctagcta gctagagctg ctggaataga |
| 1621 | catgacaatg gctgctgcca aactgttttc tcttctgagg acagatgtcc cgtgcaagtg |
| 1681 | gcttggtgga agggactagt gtctctaata tagggtgatt tataagcagg aaagtgtgtc |
| 1741 | ctagaaattc agaccagagt gatagattgg aattggatca tgggggactc attgaatgtt |
| 1801 | atttattgta tttgtttttg cgatcagtgt tagtaaagtg tcaaagggat tgagcagatg |
| 1861 | agtgacatca tgcaacacaa gttttgagtt tcacttgtca gactgactgg agaggggcct |
| 1921 | ggttagttac aggaaggtaa tttggcatgc agccactatt tttgagttga tgcaagcctc |
| 1981 | tctgtatgga gagctggtct cctttatcct gtgggaaaag agaacaaagg agcatgggag |
| 2041 | tgttcaaggg aaggagaaat aaagggcaga gaggcagcgg tggtgtcagg ggaagcccac |
| 2101 | aggagttaac agcagggttg cctcaaccta gagaggaagc gacctggtgc cctcggctct |
| 2161 | gtggcttcct tcatctaaca acatcttcca ctctacaaca atgccaggga aggcggaggc |
| 2221 | tggtacagtg catcaagaca cagctactcc tgggtgacag aggttcaggg ccagctcact |
| 2281 | aagtaggcag aagtttttga catatacttt gagagataaa gcaagattct gtacctcaac |
| 2341 | cttcagaatt tcccctacca ctcattatag ttccggagct atatagctcc tatcattcta |
| 2401 | tcataacctt agaataccag agaacatatc atctcatcta attatctctt actatatgtg |
| 2461 | aaaaaaatga aggacatggg ggaagtgtga cttgccccaa atcacatatt tcatggtaga |
| 2521 | gccaggtctt ctgtttgtca tatcagtgtt cttcctgcca caaccatctt gaagaatcta |
| 2581 | tttctcagta agaaaatatc tttatggaga gtagctggaa aacagttgag agatggaggg |
| 2641 | gaggctgggg gtgtggagag gggaaggggt aagtgataga ttcgttgaag gggggagaaa |
| 2701 | aggccgtggg gatgaagcta gaaggcagaa gggcttgcct gggcttggcc atgaaggagc |
| 2761 | atgagttcac tgagttccct ttggcttttc catgctagca atgcacgtgg cccagcctgc |
| 2821 | tgtggtactg gccagcagcc gaggcatcgc cagctttgtg tgtgagtatg catctccagg |
| 2881 | caaagccact gaggtccggg tgacagtgct tcggcaggct gacagccagg tgactgaagt |
| 2941 | ctgtgcggca acctacatga tggggaatga gttgaccttc ctagatgatt ccatctgcac |
| 3001 | gggcacctcc agtggaaatc aagtgaacct cactatccaa ggactgaggg ccatggacac |
| 3061 | gggactctac atctgcaagg tggagctcat gtacccaccg ccatactacc tgggcatagg |
| 3121 | caacggaacc cagatttatg taattggtga gcaaagccat ttcactgagt tgacacctgt |
| 3181 | tgcattgcag tcttctatgc acaaaaacag ttttgttcct taatttcagg aggtttactt |
| 3241 | ttaggactgt ggacattctc tttaagagtt ctgtaccaca tggtagcctt gcttattgtg |
| 3301 | ggtggcaacc ttaatagcat tctgactgta aaataaaatg atttggggaa gttggggctc |
| 3361 | tcgctctgga gtgctaacca tcatgacgtt tgatctgtac ttttgatatg atatgatgct |
| 3421 | cctggggaag tagtcccaaa tagccaaacc tattggtggg ctacccatgc aatttagggg |
| 3481 | tggacctcaa ggcctggaag ctctaatgtc cttttttcac caatgttggg gagtagagcc |
| 3541 | ctagagttta aaactgtctc agggaggctc tgctttgttt tctgttgcag atccagaacc |
| 3601 | gtgcccagat tctgacttcc tcctctggat ccttgcagca gttagttcgg ggttgttttt |
| 3661 | ttatagcttt ctcctcacag ctgtttcttt gagcaaaatg gtgagtgtgg tgctgatggt |
| 3721 | gcaccatgtc tgatggggat acctttagtg gtatcaactg gccaaaagat gatgttgagt |
| 3781 | ttagtgttct tgagatgaga tgaggcaata aatgaagagg aaggacagtg gtaaagaacg |
| 3841 | cactagaacc gtaggcattg gcatttgagg tttcagaatg actaatattt tagatgaatt |
| 3901 | tgtttgacat tgaatgttca tgtgcttctg agcagggttt caatttgagt aaccgttgca |
| 3961 | ataacatggg gcagctgttt tgctctttgt cttcatgaca actgtactta agctaacagc |
| 4021 | cctgaaacat gagattaggc tgggcagaat gctgctagag aggaccactt ggatggtctt |
| 4081 | tattctcctt ctccatgtcc ctctccatca cctggaagtc acctctgggt gccactctgg |
| 4141 | tgccttcctt gtcgaagctg tagctgctca catgacacct atccctgtta tccagtttgc |
| 4201 | ttgactggga cgttttgcct tccccttcag ccaggaagtg aaagtcccag tttttattta |
| 4261 | tcacaggtgt tggtattggt ggtagaaaag atagaattat ggaatcaggc ctcctgtcag |
| 4321 | gatttctttt tgacagtccc tctcagacac ctctgcctaa ggccagcttt gccattacaa |
| 4381 | actctccctt ctccctctct cccttcttct cttcctcttc cttcttctcg ctctttctct |
| 4441 | ctctctcttt ctccctctct gtctcttata cacatacaca aagatatact ctattccaac |
| 4501 | atcctctacc caacctgaca gagatgtcct ttgctgtagg ttcagcagtg gggatgagaa |
| 4561 | atacagctct caaacaggat aactaaagct tattatctta tcaagcttgt tcccttgcag |
| 4621 | acaagattga tcaattatca taggctttct gggtgttctt tctgaagctt tctcaaagtc |
| 4681 | tctttctcct atcttccatt caaggcaaat gattgccatt taacatcaaa atcacagtta |
| 4741 | tttatctaaa ataaatttta atagctgaat caagaaaatc tcctgaggtt tataattctg |
| 4801 | tatgctgtga acattcattt ttaaccagct agggacccaa tatgtgttga gttctattat |
| 4861 | ggttagaagt ggcttccgta ttcctcagta gtaattactg tttctttttg tgtttgacag |
| 4921 | ctaaagaaaa gaagccctct tacaacaggg gtctatgtga aaatgccccc aacagagcca |
| 4981 | gaatgtgaaa agcaatttca gccttatttt attcccatca attgagaaac cattatgaag |
| 5041 | aagagagtcc atatttcaat ttccaagagc tgaggcaatt ctaacttttt tgctatccag |
| 5101 | ctatttttat ttgtttgtgc atttgggggg aattcatctc tctttaatat aaagttggat |
| 5161 | gcggaaccca aattacgtgt actacaattt aaagcaaagg agtagaaaga cagagctggg |
| 5221 | atgtttctgt cacatcagct ccactttcag tgaaagcatc acttgggatt aatatgggga |
| 5281 | tgcagcatta tgatgtgggt caaggaatta agttagggaa tggcacagcc caaagaagga |
| 5341 | aaaggcaggg agcgagggag aagactatat tgtacacacc ttatatttac gtatgagacg |
| 5401 | tttatagccg aaatgatctt ttcaagttaa attttatgcc ttttatttct taaacaaatg |
| 5461 | tatgattaca tcaaggcttc aaaaatactc acatggctat gttttagcca gtgatgctaa |
| 5521 | aggttgtatt gcatatatac atatatatat atatatatat atatatatat atatatatat |
| 5581 | atatatatat atatatttta atttgatagt attgtgcata gagccacgta tgtttttgtg |
| 5641 | tatttgttaa tggtttgaat ataaacacta tatggcagtg tctttccacc ttgggtccca |
| 5701 | gggaagtttt gtggaggagc tcaggacact aatacaccag gtagaacaca aggtcatttg |
| 5761 | ctaactagct tggaaactgg atgaggtcat agcagtgctt gattgcgtgg aattgtgctg |
| 5821 | agttggtgtt gacatgtgct ttggggcttt tacaccagtt cctttcaatg gtttgcaagg |
| 5881 | aagccacagc tggtggtatc tgagttgact tgacagaaca ctgtcttgaa gacaatggct |
| 5941 | tactccagga gacccacagg tatgaccttc taggaagctc cagttcgatg ggcccaattc |
| 6001 | ttacaaacat gtggttaatg ccatggacag aagaaggcag caggtggcag aatggggtgc |
| 6061 | atgaaggttt ctgaaaatta acactgcttg tgtttttaac tcaatatttt ccatgaaaat |
| 6121 | gcaacaacat gtataatatt tttaattaaa taaaaatctg tggtggtcgt ttt (SEQ ID |
| | NO: 782) |

[0097] The CTLA4 gene is an immunoglobulin superfamily member and its polynucleotide sequence encodes a protein that transmits inhibitory signals to T cells. The protein has a V domain, a transmembrane domain, and a cytoplasmic tail. Various isoforms encoded by alternate splice variants have been characterized. The membrane-bound isoform acts as a homodimer unified by a disulfide bond, whereas the soluble isoform acts as a monomer. CTLA4 genetic mutations have been reportedly associated with insulin-dependent diabetes mellitus, Graves disease, Hashimoto thyroiditis, celiac disease, systemic lupus erythematosus, thyroid-associated orbitopathy, and other autoimmune diseases.

[0098] In some aspects, the present disclosure provides a modified primary human cell (e.g., immune cell, e.g., T cell, natural killer cell, etc.) or population thereof comprising a genome in which the CTLA4 gene on chromosome 2 has been edited to reduce or eliminate CTLA4 expression (e.g., cell surface expression) and/or activity (e.g., protein activity) in the cell or population thereof using a genetic editing system (e.g., TALENs, CRISPR/Cas, etc.). In some aspects, the present disclosure provides a modified primary human cell (e.g., immune cell, e.g., T cell, natural killer cell, etc.) or population thereof comprising a genome in which the CTLA4 gene on chromosome 2 has been edited to delete a contiguous stretch of genomic DNA, e.g., from SEQ ID NO: 782, thereby reducing or eliminating CTLA4 expression (e.g., cell surface expression) and/or activity (e.g., protein activity) in the cell or population thereof. The contiguous stretch of genomic DNA can be deleted by contacting a primary human cell (e.g., immune cell, e.g., T cell, natural killer cell, etc.) or population thereof with a Cas protein or a nucleic acid sequence encoding the Cas protein and at least one pair of ribonucleic acids (i.e., CRISPR CTLA4 gRNA pairs, e.g., at least one gRNA pair, at least two gRNA pairs, at least three gRNA pairs, at least four gRNA pairs, at least five gRNA pairs, etc.) selected from the group consisting of SEQ ID NOs: 1-195 and 797-3637.

[0099] As used herein, the term “contacting” (e.g., contacting a polynucleotide sequence with a clustered regularly interspaced short palindromic repeats-associated (Cas) protein and/or ribonucleic acids) is intended to include incubating the Cas protein and/or the ribonucleic acids in the cell together in vitro (e.g., adding the Cas protein or nucleic acid encoding the Cas protein to cells in culture) or contacting a cell ex vivo. The step of contacting a target polynucleotide sequence with a Cas protein and/or ribonucleic acids as disclosed herein can be conducted in any suitable manner. For example, the cells may be treated in adherent culture, or in suspension culture. It is understood that the cells contacted with a Cas protein and/or ribonucleic acids as disclosed herein can also be simultaneously or subsequently contacted with another agent, such as a growth factor or other differentiation agent or environments to stabilize the cells, or to differentiate the cells further.

[0100] The present disclosure contemplates reducing or eliminating CTLA4 expression and/or activity in any cell-line or primary human cell (e.g., immune cell, e.g., T cell, natural killer cell, etc.) population thereof to produce cells which reduce or eliminate T cell inhibition. Primary human cells used for genomic editing can be obtained from a subject suffering from, being treated for, diagnosed with, at risk of developing, or suspected of having, a disorder selected from the group consisting of an autoimmune disorder, cancer, a chronic infectious disease, and graft versus host disease (GVHD). Cells can also be obtained from a normal healthy subject not suffering from, being treated for, diagnosed, suspected of having, or at increased risk of developing, the disorder.

[0101] The present invention contemplates genomically editing primary human cells to cleave CTLA4 gene sequences, as well as editing the genome of such cells to alter one or more additional target polynucleotide sequences (e.g., PD1, TCRA, TCRB, B2M, etc.). It should be appreciated that cleaving a CTLA4 gene sequence using one or more gRNAs or gRNA pairs described herein can result in partial or complete deletion of the CTLA4 genomic DNA sequence (e.g., SEQ ID NO: 782).

[0102] In some aspects, the invention provides a modified primary human T cell or population thereof, each cell comprising a modified genome comprising: (a) a genomic modification (e.g., a first genomic modification) in which the cytotoxic T-lymphocyte-associated protein 4 (CTLA4) gene on chromosome 2 has been edited to delete a first contiguous stretch of genomic DNA comprising an intron flanked by at least a portion of an adjacent upstream exon and at least a portion of an adjacent downstream exon, and the 3′ end of the genomic DNA upstream with respect to the 5′ end of the deleted first contiguous stretch of genomic DNA is covalently joined to the 5′ end of the genomic DNA downstream with respect to the 3′ end of the deleted first contiguous stretch of genomic DNA to result in a modified CTLA4 gene on chromosome 2 that lacks the first contiguous stretch of genomic DNA, thereby reducing or eliminating CTLA4 receptor surface expression and/or activity in the cell.

[0103] Those skilled in the art will appreciate that deletion of the first contiguous stretch of CTLA4 genomic DNA as such can be achieved using any pair of CRISPR gRNAs targeting exons in the CTLA4 gene where a first CTLA4 gRNA targets a first exon that resides upstream with respect to a second exon downstream with respect to the first exon. Similarly, any exon pair can be targeted using this strategy to result in the cleavage of the first contiguous stretch of genomic DNA with the result that the cell thus modified's DNA repair mechanisms covalently joins the 3′ end of the genomic DNA upstream to the CTLA4 gRNA cleavage site in the first exon to the 5′ end of the genomic DNA downstream to the CTLA4 gRNA cleavage site. An example of this strategy is shown in FIG. 15A and FIG. 15B using a first pair of ribonucleic acids comprising SEQ ID NO: 128 (CR1) and SEQ ID NO: 72 (CR2). In such example, the first pair of CTLA4 gRNAs are shown targeting exon 2 and exon 3 of the CTLA4 gene. Of course, any two adjacent exons in the CTLA4 gene could be targeted using this strategy (e.g., exon 1 and exon 2, exons 3 and 4). It should further be appreciated that any portion of such CTLA4 exons which contain a CTLA4 target motif can be targeted using this strategy as long as each CTLA4 gRNA of the first pair of CTLA4 gRNAs is directed to one CTLA4 target motif in each of the adjacent CTLA4 exons. In other words, to achieve the strategy, the skilled person need only select a first CTLA4 gRNA from among SEQ ID NOs: 1-195 and 797-3637 that targets a motif in a first exon, and then select a second CTLA4 gRNA from among SEQ ID NOs: 1-195 and 797-3637 that targets a motif in a second (e.g., adjacent) exon that is either upstream or downstream relative to the first exon. In this way, the first pair of gRNAs will guide Cas protein in the cell to the first and second exons, respectively, and cleave those exons as well as the intron (or any other sequence therebetween), thereby permitting the cell's DNA repair mechanisms to covalently join the genomic DNA at the two cleavage sites to create the modified cell or population thereof with a CTLA4 gene lacking the first contiguous stretch of genomic DNA. In addition to, or as an alternate to, targeting adjacent exons, a first pair of gRNAs can be selected to target any two exons in the CTLA4 gene (e.g., exons 1 and 3, exons 1 and 4, exons 2 and 4, etc.) such that the genomic DNA sequence between the cleavage sites in those exons is deleted, and the genomic DNA sequences flanking those cleavage sites are covalently joined to result in a modified cell or population thereof with a CTLA4 gene lacking the first contiguous stretch of genomic DNA.

[0104] Table 2 below shows the genomic sequences of each of the four exons in the exemplary human CTLA4 gene. The skilled artisan can readily select pairs of CTLA4 gRNAs from among SEQ ID NOs: 1-195 and SEQ ID NOs 797-3637 to target the exons comprising SEQ ID NOs: 783-786 shown in Table 2 below using the CTLA4 targeting strategy outlined herein to carry out such strategy in a variety of ways. Alternatively, the skilled artisan can readily select at least one CTLA4 gRNA from among SEQ ID NOs: 3638-4046 to target the exons comprising SEQ ID NOs: 783-786 shown in Table 2 below using the CTLA4 targeting strategy outlined herein to carry out such strategy in a variety of ways. The size of the at least the portion of the upstream exon and the at least the portion of the downstream exon deleted using this strategy depends on the location in which the CTLA4 gRNAs direct cleavage in each respective exons. For example, the entire portion of the exon downstream relative to the cleavage site in the upstream exon and the entire portion of the exon upstream relative to the cleavage site in the downstream exon will be deleted using this strategy. Thus, one can delete larger portions of targeted exons using this strategy by selecting CTLA4 gRNAs targeting motifs closest to the 5′ end of the upstream exon and closest to the 3′ end of the adjacent downstream exon. Conversely, one can delete smaller portions of targeted exons by selecting CTLA4 gRNAs targeting motifs farthest away from the 5′ end of the upstream exon and farthest away from the 3′ end of the adjacent downstream exon.

TABLE 2
CTLA4 Exon 1 - location: 5,003 . . . 5,266; length 264 bp

| | |
|---|---|
| 1 | cttctgtgtg tgcacatgtg taatacatat ctgggatcaa agctatctat ataaagtcct |
| 61 | tgattctgtg tgggttcaaa cacatttcaa agcttcagga tcctgaaagg ttttgctcta |
| 121 | cttcctgaag acctgaacac cgctcccata aagccatggc ttgccttgga tttcagcggc |
| 181 | acaaggctca gctgaacctg gctaccagga cctggccctg cactctcctg ttttttcttc |
| 241 | tcttcatccc tgtcttctgc aaag (SEQ ID NO: 783) |

CTLA4 Exon 2 - location: 7,801 . . . 8,148; length 348

| | |
|---|---|
| 1 | caatgcacgt ggcccagcct gctgtggtac tggccagcag ccgaggcatc gccagctttg |
| 61 | tgtgtgagta tgcatctcca ggcaaagcca ctgaggtccg ggtgacagtg cttcggcagg |
| 121 | ctgacagcca ggtgactgaa gtctgtgagg caacctacat gatggggaat gagttgacct |
| 181 | tcctagatga ttccatctgc acgggcacct ccagtggaaa tcaagtgaac ctcactatcc |
| 241 | aaggactgag ggccatggac acgggactct acatctgcaa ggtggagctc atgtacccac |
| 301 | cgccatacta cctgggcata ggcaacggaa cccagattta tgtaattg (SEQ ID NO: |
| | 784) |

CTLA4 Exon 3 - location: 8,593 . . . 8,702; length 110

| | |
|---|---|
| 1 | atccagaacc gtgcccagat tctgacttcc tcctctggat ccttgcagca gttagttcgg |
| 61 | ggttgttttt ttatagcttt ctcctcacag ctgtttcttt gagcaaaatg (SEQ ID NO: |
| | 785) |

CTLA4 Exon 4 - location: 9,923 . . . 11,175; length 1,253

| | |
|---|---|
| 1 | ctaaagaaaa gaagccctct tacaacaggg gtctatgtga aaatgccccc aacagagcca |
| 61 | gaatgtgaaa agcaatttca gccttatttt attcccatca attgagaaac cattatgaag |
| 121 | aagagagtcc atatttcaat ttccaagagc tgaggcaatt ctaacttttt tgctatccag |
| 181 | ctatttttat ttgtttgtgc atttgggggg aattcatctc tctttaatat aaagttggat |
| 241 | gcggaaccca aattacgtgt actacaattt aaagcaaagg agtagaaaga cagagctggg |
| 301 | atgtttctgt cacatcagct ccactttcag tgaaagcatc acttgggatt aatatgggga |
| 361 | tgcagcatta tgatgtgggt caaggaatta agttagggaa tggcacagcc caaagaagga |
| 421 | aaaggcaggg agcgagggag aagactatat tgtacacacc ttatatttac gtatgagacg |
| 481 | tttatagccg aaatgatctt ttcaagttaa attttatgcc ttttatttct taaacaaatg |
| 541 | tatgattaca tcaaggcttc aaaaatactc acatggctat gttttagcca gtgatgctaa |
| 601 | aggttgtatt gcatatatac atatatatat atatatatat atatatatat atatatatat |
| 661 | atatatatat atatatttta atttgatagt attgtgcata gagccacgta tgtttttgtg |
| 721 | tatttgttaa tggtttgaat ataaacacta tatggcagtg tctttccacc ttgggtccca |
| 781 | gggaagtttt gtggaggagc tcaggacact aatacaccag gtagaacaca aggtcatttg |
| 841 | ctaactagct tggaaactgg atgaggtcat agcagtgctt gattgcgtgg aattgtgctg |
| 901 | agttggtgtt gacatgtgct ttggggcttt tacaccagtt cctttcaatg gtttgcaagg |
| 961 | aagccacagc tggtggtatc tgagttgact tgacagaaca ctgtcttgaa gacaatggct |
| 1021 | tactccagga gacccacagg tatgaccttc taggaagctc cagttcgatg ggcccaattc |
| 1081 | ttacaaacat gtggttaatg ccatggacag aagaaggcag caggtggcag aatggggtgc |
| 1141 | atgaaggttt ctgaaaatta acactgcttg tgtttttaac tcaatatttt ccatgaaaat |
| 1201 | gcaacaacat gtataatatt tttaattaaa taaaaatctg tggtggtcgt ttt (SEQ ID |
| | NO: 786) |

[0105] In some aspects, the invention provides a modified primary human T cell or population thereof, each cell comprising a modified genome comprising: (a) a genomic modification (e.g., a first genomic modification) in which the cytotoxic T-lymphocyte-associated protein 4 (CTLA4) gene on chromosome 2 has been edited to delete a contiguous stretch (e.g., a first contiguous stretch) of genomic DNA, thereby reducing or eliminating CTLA4 receptor surface expression and/or activity in the cell, wherein the contiguous stretch (e.g., first contiguous stretch) of genomic DNA has been deleted by contacting the cell with a Cas protein or a nucleic acid encoding the Cas protein and a pair (e.g., first pair) of ribonucleic acids having sequences selected from the group consisting of SEQ ID NOs: 1-195 and 797-3637. In some embodiments, the first pair of ribonucleic acids comprises SEQ ID NO: 128 and SEQ ID NO: 72.

[0106] In some aspects, the invention provides a method for altering a target CTLA4 polynucleotide sequence in a cell comprising contacting the CTLA4 polynucleotide sequence with a clustered regularly interspaced short palindromic repeats-associated (Cas) protein and from one to two ribonucleic acids, wherein the ribonucleic acids hybridize to the (e.g.) CTLA4 polynucleotide sequence and direct Cas protein to a target motif of the target CTLA4 polynucleotide sequence, wherein the target CTLA4 polynucleotide sequence is cleaved, and wherein at least one of the one to two ribonucleic acids are selected from the group consisting of SEQ ID NOs. 1-195 and 797-3637. In some embodiments, each of the one to two ribonucleic acids is selected from the group consisting of SEQ ID NOs: 1-195 and 797-3637. In some embodiments, the two ribonucleic acids comprise SEQ ID NO: 128 and SEQ ID NO: 72.

[0107] In some aspects, the invention provides a modified primary human T cell or population thereof, each cell comprising a modified genome comprising: (a) a genomic modification (e.g., a first genomic modification) in which the cytotoxic T-lymphocyte-associated protein 4 (CTLA4) gene on chromosome 2 has been edited to reduce or eliminate CTLA4 receptor surface expression and/or activity in the cell by contacting the cell with a Cas protein or a nucleic acid encoding the Cas protein and at least one ribonucleic acid having a sequence selected from the group consisting of SEQ ID NOs: 3638-4046.

[0108] In some aspects, the invention provides a method for altering a target CTLA4 polynucleotide sequence in a cell comprising contacting the CTLA4 polynucleotide sequence with a clustered regularly interspaced short palindromic repeats-associated (Cas) protein and at least one ribonucleic acid, wherein the ribonucleic acid directs Cas protein to and hybridizes to a target motif of the target CTLA4 polynucleotide sequence, wherein the target CTLA4 polynucleotide sequence is cleaved, and wherein the at least one ribonucleic acid is selected from the group consisting of SEQ ID NOs. 3638-4046. In certain aspects, a subsequent alteration to the target CTLA4 polynucleotide sequence in the cell results in a second cleavage of the target CTLA4 polynucleotide sequence, thereby editing the target CTLA4 polynucleotide sequence to delete a first contiguous stretch of genomic DNA.

[0109] Programmed Cell Death 1 (PD1)

[0110] In some embodiments, the target polynucleotide sequence is PD1, or a homolog, ortholog, or variant thereof (Gene ID: 5133, also known as PD-1, CD279, SLEB2, hPD-1, hPD-I, and hSLE1). An exemplary PD1 human target polynucleotide sequence is shown in Table 3 below (NG_012110.1 RefSeqGene; SEQ ID NO: 787).

TABLE 3
Exemplary human PD1 target polynucleotide sequence

| | |
|---|---|
| 1 | agtttccctt ccgctcacct ccgcctgagc agtggagaag gcggcactct ggtggggctg |
| 61 | ctccaggcat gcagatccca caggcgccct ggccagtcgt ctgggcggtg ctacaactgg |
| 121 | gctggcggcc aggatggttc ttaggtaggt ggggtcggcg gtcaggtgtc ccagagccag |
| 181 | gggtctggag ggaccttcca ccctcagtcc ctggcaggtc ggggggtgct gaggcgggcc |
| 241 | tggccctggc agcccagggg tcccggagcg aggggtctgg agggaccttt cactctcagt |
| 301 | ccctggcagg tcggggggtg ctgtggcagg cccagccttg gcccccagct ctgcccctta |
| 361 | ccctgagctg tgtggctttg ggcagctcga actcctgggt tcctctctgg gccccaactc |
| 421 | ctccectggc ccaagtcccc tctttgctcc tgggcaggca ggacctctgt cccctctcag |
| 481 | ccggtccttg gggctgcgtg tttctgtaga atgacgggtc aggctggcca gaaccccaaa |
| 541 | ccttggccgt ggggagtctg cgtggcggct ctgccttgcc caggcatcct tggtcctcac |
| 601 | tcgagttttc ctaaggatgg gatgagcccc atgtgggact aaccttggct ttacgacgtc |
| 661 | aaagtttaga tgagctggtg atatttttct cattatatcc aaagtgtacc tgttcgagtg |
| 721 | aggacagttc ttctgtctcc aggatccctc ctgggtgggg attgtgcccg cctgggtctc |
| 781 | tgcccagatt ccagggctct ccccgagccc tgttcagacc atccgtgggg gaggccttgg |
| 841 | cctcactctc ccggatcgag gagagaggga gcctcttcct gggctgcccg tgaccctggg |
| 901 | ccctctgtgt acactgtgac cacagcccgc tcctggaccc tctgtgcccg gctggccctc |
| 961 | tgtgcccagc cagcctgcac ctggggatgc caaggcctgg ggagggtggt ttcacccagg |
| 1021 | ccaagcctaa gacagtccct ctgggccctg ctgggtaccg gggtgtgaca ccactgggag |
| 1081 | gacaagatga ggggcacccc tggggccgcc ctgacacccc ctcgaggctc ctgccccggg |
| 1141 | ggtcctggtg ccccttcact gtggcaggcg actgggggtt ccccacctcg gcccctctcc |
| 1201 | cggggcctgc tccccggcac ctgaggcagc atccttgtca gggccgtgcc ttcctgcctc |
| 1261 | agcgccacct cttaaggttg gcccgtgggt cactcaggac tcagaactgg agattctggg |
| 1321 | caaaaggcaa agagcaaagg gccaaaaggc atcccaggga gacgactgcg ggggaaccag |
| 1381 | agggcagagg ggcgctcgtc acaggggagg gggagctgag cgaggcagga ggggagccga |
| 1441 | gcctctcccc ccgtgtcccg gctcttcagg cacgccctcg ggacgccacc ctccccgacc |
| 1501 | caggcgggaa agataagagc aaggtgtccg cagcctgaca ctcgtgcctc aggtgcccgc |
| 1561 | gcttgtgccg gacaagactc tcacaggtgg catgcctcgg tttccccact ggtaacagca |
| 1621 | cagggcactc agcaaggcgc agtgggcatg actggggtcc tgtgggtcct gacccagatg |
| 1681 | tggccacccc ggccgcagtg gtcttcattc caggatgcct cttttccctc ctgatctatt |
| 1741 | cactgcgttc gccattcggt cattcccggg gccaccactc ccacctcagg tgtgtgcttc |
| 1801 | ccttgtgttt tatgagatat ccccaacccg gctgcttatt ggccccgtcc gagggcagga |
| 1861 | gcataaataa gagcctctgc tttggcgtgg gaccactgtg agctccagtc agcgctgcca |
| 1921 | ctgctgagct ctgggccttc gacaggactt ggccccttac tgacttctca gtgtgctttg |
| 1981 | ggtcatgggt gaggacgcct cctggcaagg ctgcgtcctg aggattaaat cgggtcatct |
| 2041 | gtgaaaacta cccagcccag cacctgacac ttttttgttt gtttctttta gtgacagggt |
| 2101 | cttgctctgt cacccaggct ggagtgcagt ggtgtgatct cggctcactc gacctccggg |
| 2161 | gctcaagcaa ttctcccacc tctgcctcca gagtagctgg gactataggc acgtgccacc |
| 2221 | ctgccaggct aatttcttcc atttttttta gagacagggt ctcgctatgt tccccaggct |
| 2281 | gggctcaaat ggtcctccca cctcagcctc cccaagtact gggattacag gcataagcca |
| 2341 | ctgcatctgg cctccatgac acatattttt aaagtctgat ttttaaagtc aaacttttga |
| 2401 | agtcagattt taaacggact attttgaaaa atatacaaaa acgtttaaaa acaatgaata |
| 2461 | tccctcacct agaatcaata actaagaata ttgacacatt tgctttgggg actgggcggc |
| 2521 | tggagctgcc atgacaaagc tccgccgacc gagtggcttt taaacagagc ctgccctctc |
| 2581 | gccgactgag ggctggacgt gcaggatgga gctccgcagg gtcggctccc ctgtgctctg |
| 2641 | aggggctctg ctcagcctct cccggctgtg gcttaaaaac agagcctgtc ctcccgccat |
| 2701 | ggggggctgg acatgcagga ccgaggggcc acagggtcgg ctccctgtgc tccgagaggg |
| 2761 | ctctgctcag cttctcctgg ctggggggtt ttgtggccac cctctgtgtt cctgggttca |
| 2821 | gaagcatccc ccaggctctg ccttcatctc tgcacgggtg actctgtaca ggaagccagg |
| 2881 | cctgctggtc aatggccacc cagccctgtg ccctcatctt acctagtccc agctgccgtc |
| 2941 | accctattcc taataaggcc gccttctgag gtcatggggt taggacttcc acataggaat |
| 3001 | ctgtggggac acggttcggc ccacagccct tcccacctcc acacacacac acgactgtga |
| 3061 | ggagttggaa gacctcactc ctcacccctg ccaggtcctc tagggacaag ctcgctgtcc |
| 3121 | tcatcccagc acagcccgtg ggacggtttc cttgtcccta atgggaccac ggtcagagat |
| 3181 | gccgggtctg gtctgggcca gcaggttcct ccgcccgggg caggcagcct tcttctgtgc |
| 3241 | gcttctggaa agcaatgtcc tgtaatgcgg tctctctgcg ggagcacccc caccgccacc |
| 3301 | tcacaggcct gttccacagc cccgggatgg gctctgtctc cctcctgacc ctgcataggg |
| 3361 | cacagccctc tctcatcaac ccacgatcct acgtggatcc gagagggagc acctggggaa |
| 3421 | acaatggaat cccatagaaa caccccaaat ctaacttgat ccaggaccag ccagtggtca |
| 3481 | cttctgaata ttcaccttcc tagtagacac taccagccaa gggaggccag gaagccttcc |
| 3541 | tggaggaggt ggcctgagga ctggggtgag gcaggccctg cgtgggggtc gccacccagc |
| 3601 | acccccacac tgggtgggag ccagtctctg agactggctg ggggaggtgg gagagggggc |
| 3661 | tgcttgaact gcagacaccg aggtctagcc cccaccccac ccagccagtt ggtggaggca |
| 3721 | ggggaggccg aggggcccag ctggacctgc tccccggggt ggattccaaa ataggggggt |
| 3781 | tggggggggc ggaacaggag cccagggtcc tggcttgagg cccagtggct gagggctggt |
| 3841 | gcaagccaga caggaaaagg gttgagcctg tcagcgccag cacagatcaa gtcaggagca |
| 3901 | ggtccctcca ccaatgtgtg caaataaata gcagctaagt ttccagttac aagaacaatg |
| 3961 | cacagatggt cccagggaca ttgcggtgtg gacacacagc ggccattgtc ctgtcgccag |
| 4021 | cacctcgccc tacagctggg gggtccctta gcacttccta gccatgcagg gtccctgctc |
| 4081 | acagtacccg tgatgacttc tgttcctcac ctgcctgtct gtcccgacag ctgcatggca |
| 4141 | gccctggcct gggagatgga gaccccgagg ggctgcctgc ggtggtgggg cccctgggtc |
| 4201 | cccactgcat tcccagaaac ccagagggca gggcatttcc cctgctctgt gccgagtcca |
| 4261 | cccagcccca gcctaggccc agtaagggct gcagcccacc ctgtcccagg ctgcctccca |
| 4321 | ggagccctct tggccctgat gccagaagcc catcttcctc cattcaggca ggtctctgag |
| 4381 | tgccctggcc tggctgcctg ctggccctga gagtcacact accccacagc cctccttggt |
| 4441 | caaaatccac tctggagtgg ctggaagatt ccccgggccc acgccgcaca cgcctatgca |
| 4501 | gggagcttcc cctggccggc cggcagacaa gggcggtctc agagaggggg ctcacctcag |
| 4561 | cagccccttg tgtagctggc cctcgcccct gccacctctg ggaacaccac caggaagctg |
| 4621 | ggggacaggc acgcaggtga aggaggcgag cgcttgtcag ccgggaggcc atgggcacag |
| 4681 | agggaacagg gacaccctgg gtggcctcaa ggtcacttca aacccctcac tcgtcccctg |
| 4741 | ggagggtgcc cagtgaggtt ggcactagga gttggtcctg gtcacatgac agacccaccc |
| 4801 | acctctggtg tccagccagc acgccgtggg ccagcctggc tgcagggaca cgagggcagc |
| 4861 | agccccctcc tcctctgagc tggttgctcc ttgagtcatc accaccgcct gccacggagg |
| 4921 | ccgcctgtcc caggaagcag agggaccgca gctgtggcaa ccagggcctg gtctctgtgt |
| 4981 | cacctcgctg gggggccgtg cccaggcctg agacggaact gagtgacagt gcactgggtc |
| 5041 | tgacagtgtg gggctggcgc catgtttggg gaaccctgtg gcatgggacc tgtgggtgag |
| 5101 | ccgggaaaat caccccgttg catggcatct cgggcctgga tcttaagcgc ctgtgttggt |
| 5161 | gcctccgcct ggcggaagag ccgcgacccc cacgttgcca tgcgggtatc ccaagccctg |
| 5221 | accctggcag gcatatgttt caggaggtcc ttgtcttggg agcccagggt cgggggcccc |
| 5281 | gtgtctgtcc acatccgagt caatggccca tctcgtctct gaagcatctt tgctgtgagc |
| 5341 | tctagtcccc actgtcttgc tggaaaatgt ggaggcccca ctgcccactg cccagggcag |
| 5401 | caatgcccat accacgtggt cccagctccg agcttgtcct gaaaaggggg caaagactgg |
| 5461 | accctgagcc tgccaagggg ccacactcct cccagggctg gggtctccat gggcagcccc |
| 5521 | ccacccaccc agaccagtta cactcccctg tgccagagca gtgcagacag gaccaggcca |
| 5581 | ggatgcccaa gggtcagggg ctggggatgg gtagccccca aacagccctt tctgggggaa |
| 5641 | ctggcctcaa cggggaaggg ggtgaaggct cttagtagga aatcagggag acccaagtca |
| 5701 | gagccaggtg ctgtgcagaa gctgcagcct cacgtagaag gaagaggctc tgcagtggag |
| 5761 | gccagtgccc atccccgggt ggcagaggcc ccagcagaga cttctcaatg acattccagc |
| 5821 | tggggtggcc cttccagagc ccttgctgcc cgagggatgt gagcaggtgg ccggggaggc |
| 5881 | tttgtggggc cacccagccc cttcctcacc tctctccatc tctcagactc cccagacagg |
| 5941 | ccctggaacc cccccacctt ctccccagcc ctgctcgtgg tgaccgaagg ggacaacgcc |
| 6001 | accttcacct gcagcttctc caacacatcg gagagcttcg tgctaaactg gtaccgcatg |
| 6061 | agccccagca accagacgga caagctggcc gccttccccg aggaccgcag ccagcccggc |
| 6121 | caggactgcc gcttccgtgt cacacaactg cccaacgggc gtgacttcca catgagcgtg |
| 6181 | gtcagggccc ggcgcaatga cagcggcacc tacctctgtg gggccatctc cctggccccc |
| 6241 | aaggcgcaga tcaaagagag cctgcgggca gagctcaggg tgacaggtgc ggcctcggag |
| 6301 | gccccggggc aggggtgagc tgagccggtc ctggggtggg tgtcccctcc tgcacaggat |
| 6361 | caggagctcc agggtcgtag ggcagggacc ccccagctcc agtccagggc tctgtcctgc |
| 6421 | acctggggaa tggtgaccgg catctctgtc ctctagctct ggaagcaccc cagcccctct |
| 6481 | agtctgccct cacccctgac cctgaccctc caccctgacc ccgtcctaac ccctgacctt |
| 6541 | tgtgcccttc cagagagaag ggcagaagtg cccacagccc accccagccc ctcacccagg |
| 6601 | ccagccggcc agttccaaac cctggtggtt ggtgtcgtgg gcggcctgct gggcagcctg |
| 6661 | gtgctgctag tctgggtcct ggccgtcatc tgctcccggg ccgcacgagg taacgtcatc |
| 6721 | ccagcccctc ggcctgccct gccctaaccc tgctggcggc cctcactccc gcctcccctt |
| 6781 | cctccaccct tccctcaccc caccccacct ccccccatct ccccgccagg ctaagtccct |
| 6841 | gatgaaggcc cctggactaa gaccccccac ctaggagcac ggctcagggt cggcctggtg |
| 6901 | accccaagtg tgtttctctg cagggacaat aggagccagg cgcaccggcc agcccctggt |
| 6961 | gagtctcact cttttcctgc atgatccact gtgccttcct tcctgggtgg gcagaggtgg |
| 7021 | aaggacaggc tgggaccaca cggcctgcag gactcacatt ctattatagc caggacccca |
| 7081 | cctccccagc ccccaggcag caacctcaat ccctaaagcc atgatctggg gccccagccc |
| 7141 | acctgcggtc tccgggggtg cccggcccat gtgtgtgcct gcctgcggtc tccaggggtg |
| 7201 | cctggcccac gcgtgtgccc gcctgcggtc tctgggggtg cccggcccac atatgtgcct |
| 7261 | gcctgcggtc tccaggtgtg cccggcccat gcgtgtgccc acctgcgagg gcgtggggtg |
| 7321 | ggcttggtca tttcttatct tacattggag acaggagagc ttgaaaagtc acattttgga |
| 7381 | atcctaaatc tgcaagaatg ccagggacat ttcagagggg gacattgagc cagagaggag |
| 7441 | gggtggtgtc cccagatcac acagagggca gtggtgggac agctcagggt aagcagctca |
| 7501 | tagtgggggg cccaggttcg gtgccggtac tgcagccagg ctgtggagcc gcgggcctcc |
| 7561 | ttcctgcggt gggccgtggg gctgactccc tctccctttc tcctcaaaga aggaggaccc |
| 7621 | ctcagccgtg cctgtgttct ctgtggacta tggggagctg gatttccagt ggcgagagaa |
| 7681 | gaccccggag ccccccgtgc cctgtgtccc tgagcagacg gagtatgcca ccattgtctt |
| 7741 | tcctagcgga atgggcacct catcccccgc ccgcaggggc tcagctgacg gccctcggag |
| 7801 | tgcccagcca ctgaggcctg aggatggaca ctgctcttgg cccctctgac cggcttcctt |
| 7861 | ggccaccagt gttctgcaga ccctccacca tgagcccggg tcagcgcatt tcctcaggag |
| 7921 | aagcaggcag ggtgcaggcc attgcaggcc gtccaggggc tgagctgcct gggggcgacc |
| 7981 | ggggctccag cctgcacctg caccaggcac agccccacca caggactcat gtctcaatgc |
| 8041 | ccacagtgag cccaggcagc aggtgtcacc gtcccctaca gggagggcca gatgcagtca |
| 8101 | ctgcttcagg tcctgccagc acagagctgc ctgcgtccag ctccctgaat ctctgctgct |
| 8161 | gctgctgctg ctgctgctgc tgcctgcggc ccggggctga aggcgccgtg gccctgcctg |
| 8221 | acgccccgga gcctcctgcc tgaacttggg ggctggttgg agatggcctt ggagcagcca |
| 8281 | aggtgcccct ggcagtggca tcccgaaacg ccctggacgc agggcccaag actgggcaca |
| 8341 | ggagtgggag gtacatgggg ctggggactc cccaggagtt atctgctccc tgcaggccta |
| 8401 | gagaagtttc agggaaggtc agaagagctc ctggctgtgg tgggcagggc aggaaacccc |
| 8461 | tccaccttta cacatgccca ggcagcacct caggcccttt gtggggcagg gaagctgagg |
| 8521 | cagtaagcgg gcaggcagag ctggaggcct ttcaggccca gccagcactc tggcctcctg |
| 8581 | ccgccgcatt ccaccccagc ccctcacacc actcgggaga gggacatcct acggtcccaa |
| 8641 | ggtcaggagg gcagggctgg ggttgactca ggcccctccc agctgtggcc acctgggtgt |
| 8701 | tgggagggca gaagtgcagg cacctagggc cccccatgtg cccaccctgg gagctctcct |
| 8761 | tggaacccat tcctgaaatt atttaaaggg gttggccggg ctcccaccag ggcctgggtg |
| 8821 | ggaaggtaca ggcgttcccc cggggcctag tacccccgcc gtggcctatc cactcctcac |
| 8881 | atccacacac tgcaccccca ctcctggggc agggccacca gcatccaggc ggccagcagg |
| 8941 | cacctgagtg gctgggacaa gggatccccc ttccctgtgg ttctattata ttataattat |
| 9001 | aattaaatat gagagcatgc taagga (SEQ ID NO: 787) |

[0111] The PD1 gene codes for an immunoglobulin superfamily cell surface membrane protein, which is expressed in pro-B-cells and believed to be involved in their differentiation. When mice are injected with anti-CD3 antibodies the expression of this gene is induced in thymus in mice resulting in apoptosis of a large quantity of thymocytes. The product of this gene is also believed to be important in T cell function and play a role in the prevention of autoimmune diseases.

[0112] In some aspects, the present disclosure provides a modified primary human cell (e.g., immune cell, e.g., T cell, natural killer cell, etc.) or population thereof comprising a genome in which the PD1 gene on chromosome 2 has been edited to reduce or eliminate PD1 expression (e.g., cell surface expression) and/or activity (e.g., protein activity) in the cell or population thereof using a genetic editing system (e.g., TALENs, CRISPR/Cas, etc.). In some aspects, the present disclosure provides a modified primary human cell (e.g., immune cell, e.g., T cell, natural killer cell, etc.) or population thereof comprising a genome in which the PD1 gene on chromosome 2 has been edited to delete a contiguous stretch of genomic DNA, e.g., from SEQ ID NO: 787, thereby reducing or eliminating PD1 expression (e.g., cell surface expression) and/or activity (e.g., protein activity) in the cell or population thereof. The contiguous stretch of genomic DNA can be deleted by contacting a primary human cell (e.g., immune cell, e.g., T cell, natural killer cell, etc.) or population thereof with a Cas protein or a nucleic acid sequence encoding the Cas protein and at least one pair of ribonucleic acids (i.e., CRISPR PD1 gRNA pairs, e.g., at least one gRNA pair, at least two gRNA pairs, at least three gRNA pairs, at least four gRNA pairs, at least five gRNA pairs, etc.) at least one of which is selected from the group consisting of SEQ ID NOs: 196-531 and 4047-8945.

[0113] The present disclosure contemplates reducing or eliminating PD1 expression and/or activity in any cell line or primary human cell (e.g., immune cell, e.g., T cell, natural killer cell, etc.) population thereof to produce cells which reduce or eliminate T cell inhibition. Primary human cells used for genomic editing can be obtained from a subject suffering from, being treated for, diagnosed with, at risk of developing, or suspected of having, a disorder selected from the group consisting of an autoimmune disorder, cancer, a chronic infectious disease, and graft versus host disease (GVHD). Cells can also be obtained from a normal healthy subject not suffering from, being treated for, diagnosed, suspected of having, or at increased risk of developing, the disorder.

[0114] The present invention contemplates genomically editing primary human cells to cleave PD1 gene sequences, as well as editing the genome of such cells to alter one or more additional target polynucleotide sequences (e.g., CTLA4, TCRA, TCRB, B2M, etc.). It should be appreciated that cleaving a PD1 gene sequence using one or more gRNAs or gRNA pairs described herein can result in partial or complete deletion of the PD1 genomic DNA sequence (e.g., SEQ ID NO: 787).

[0115] In some aspects, the invention provides a modified primary human T cell or population thereof, each cell comprising a modified genome comprising: (b) a genomic modification (e.g., a second genomic modification) in which the PD1 gene on chromosome 2 has been edited to delete a second contiguous stretch of genomic DNA comprising an intron flanked by at least a portion of an adjacent upstream exon and at least a portion of an adjacent downstream exon, and the 3′ end of the genomic DNA upstream with respect to the 5′ end of the deleted second contiguous stretch of genomic DNA is covalently joined to the 5′ end of the genomic DNA downstream with respect to the 3′ end of the deleted second contiguous stretch of genomic DNA to result in a modified PD1 gene on chromosome 2 that lacks the second contiguous stretch of genomic DNA, thereby reducing or eliminating PD1 receptor surface expression and/or activity in the cell.

[0116] Those skilled in the art will appreciate that deletion of the second contiguous stretch of PD1 genomic DNA as such can be achieved using any pair of CRISPR gRNAs targeting exons in the PD1 gene where a first PD1 gRNA targets a first exon that resides upstream with respect to a second exon downstream with respect to the first exon. Similarly, any exon pair can be targeted using this strategy to result in the cleavage of the second contiguous stretch of genomic DNA with the result that the cell thus modified's DNA repair mechanisms covalently joins the 3′ end of the genomic DNA upstream to the PD1 gRNA cleavage site in the first exon to the 5′ end of the genomic DNA downstream to the PD1 gRNA cleavage site. An example of this strategy is shown in FIG. 13A and FIG. 13B using a first pair of ribonucleic acids comprising SEQ ID NO: 462 (CR1) and SEQ ID NO: 421 (CR2). In such example, the first pair of PD1 gRNAs are shown targeting exon 2 and exon 3 of the PD1 gene. Of course, any two adjacent exons in the PD1 gene could be targeted using this strategy (e.g., exon 1 and exon 2, exons 3 and 4, exons 4 and 5). It should further be appreciated that any portion of such PD1 exons which contains a CRISPR gRNA PD1 target motif can be targeted using this strategy as long as each PD1 gRNA of the first pair of PD1 gRNAs is directed to one CRISPR gRNA PD1 target motif in each of the adjacent PD1 exons. In other words, to achieve the strategy, the skilled person need only select a first PD1 gRNA from among SEQ ID NOs: 196-531 and 4047-8945 that targets a motif in a first exon, and then select a second PD1 gRNA from among SEQ ID NOs: 196-531 and 4047-8945 that targets a motif in a second (e.g., adjacent) exon that is either upstream or downstream relative to the first exon. In this way, the first pair of gRNAs will guide Cas protein in the cell to the first and second exons, respectively, and cleave those exons as well as the intron (or any other sequence therebetween), thereby permitting the cell's DNA repair mechanisms to covalently join the genomic DNA at the two cleavage sites to create the modified cell or population thereof with a PD1 gene lacking the second contiguous stretch of genomic DNA. In addition to, or as an alternate to, targeting adjacent exons, a first pair of gRNAs can be selected to target any two exons in the PD1 gene (e.g., exons 1 and 3, exons 1 and 4, exons 1 and 5, exons 2 and 4, exons 2 and 5, etc.) such that the genomic DNA sequence between the cleavage sites in those exons is deleted, and the genomic DNA sequences flanking those cleavage sites are covalently joined to result in a modified cell or population thereof with a PD1 gene lacking the second contiguous stretch of genomic DNA.

[0117] Table 4 below shows the genomic sequences of each of the five exons in the exemplary human PD1 gene. The skilled artisan can readily select pairs of PD1 gRNAs from among SEQ ID NOs: 196-531 and 4047-8945 to target the exons comprising SEQ ID NOs: 788-792 shown in Table 4 below using the PD1 targeting strategy outlined herein to carry out such strategy in a variety of ways. Alternatively, the skilled artisan can readily select at least one PD1gRNA from among SEQ ID NOs: 8946-9101 to target the exons comprising SEQ ID NOs: 788-792 shown in Table 4 below using the PD1 targeting strategy outlined herein to carry out such strategy in a variety of ways. The size of the at least the portion of the upstream exon and the at least the portion of the downstream exon deleted using this strategy depends on the location in which the PD1 gRNAs direct cleavage in each respective exons. For example, the entire portion of the exon downstream relative to the cleavage site in the upstream exon and the entire portion of the exon upstream relative to the cleavage site in the downstream exon will be deleted using this strategy. Thus, one can delete larger portions of targeted exons using this strategy by selecting PD1 gRNAs targeting motifs closest to the 5′ end of the upstream exon and closest to the 3′ end of the adjacent downstream exon. Conversely, one can delete smaller portions of targeted exons by selecting PD1 gRNAs targeting motifs farthest away from the 5′ end of the upstream exon and farthest away from the 3′ end of the adjacent downstream exon.

TABLE 4
PD1 Exon 1 - location: 5,001 . . . 5,144; length 144 bp

| | |
|---|---|
| 1 | agtttccctt ccgctcacct ccgcctgagc agtggagaag gcggcactct ggtggggctg |
| 61 | ctccaggcat gcagatccca caggcgccct ggccagtcgt ctgggcggtg ctacaactgg |
| 121 | gctggcggcc aggatggttc ttag (SEQ ID NO: 788) |

PD1 Exon 2 - location: 10,927 . . . 11,286; length 360

| | |
|---|---|
| 1 | actccccaga caggccctgg aaccccccca ccttctcccc agccctgctc gtggtgaccg |
| 61 | aaggggacaa cgccaccttc acctgcagct tctccaacac atcggagagc ttcgtgctaa |
| 121 | actggtaccg catgagcccc agcaaccaga cggacaagct ggccgccttc cccgaggacc |
| 181 | gcagccagcc cggccaggac tgccgcttcc gtgtcacaca actgcccaac gggcgtgact |
| 241 | tccacatgag cgtggtcagg gcccggcgca atgacagcgg cacctacctc tgtggggcca |
| 301 | tctccctggc ccccaaggcg cagatcaaag agagcctgcg ggcagagctc agggtgacag |
| | (SEQ ID NO 789) |

PD1 Exon 3 - location: 11,554 . . . 11,709; length 156

| | |
|---|---|
| 1 | agagaagggc agaagtgccc acagcccacc ccagcccctc acccaggcca gccggccagt |
| 61 | tccaaaccct ggtggttggt gtcgtgggcg gcctgctggg cagcctggtg ctgctagtct |
| 121 | gggtcctggc cgtcatctgc tcccgggccg cacgag |
| | (SEQ ID NO: 790) |

PD1 Exon 4 - location: 11,924 . . . 11,958; length 35

| | |
|---|---|
| 1 | ggacaatagg agccaggcgc accggccagc ccctg(SEQ ID NO: 791) |

PD1 Exon 5 - location: 12,610 . . . 14,026; length 1,417

| | |
|---|---|
| 1 | aaggaggacc cctcagccgt gcctgtgttc tctgtggact atggggagct ggatttccag |
| 61 | tggcgagaga agaccccgga gccccccgtg ccctgtgtcc ctgagcagac ggagtatgcc |
| 121 | accattgtct ttcctagcgg aatgggcacc tcatcccccg cccgcagggg ctcagctgac |
| 181 | ggccctcgga gtgcccagcc actgaggcct gaggatggac actgctcttg gcccctctga |
| 241 | ccggcttcct tggccaccag tgttctgcag accctccacc atgagcccgg gtcagcgcat |
| 301 | ttcctcagga gaagcaggca gggtgcaggc cattgcaggc cgtccagggg ctgagctgcc |
| 361 | tgggggcgac cggggctcca gcctgcacct gcaccaggca cagccccacc acaggactca |
| 421 | tgtctcaatg cccacagtga gcccaggcag caggtgtcac cgtcccctac agggagggcc |
| 481 | agatgcagtc actgcttcag gtcctgccag cacagagctg cctgcgtcca gctccctgaa |
| 541 | tctctgctgc tgctgctgct gctgctgctg ctgcctgcgg cccggggctg aaggcgccgt |
| 601 | ggccctgcct gacgccccgg agcctcctgc ctgaacttgg gggctggttg gagatggcct |
| 661 | tggagcagcc aaggtgcccc tggcagtggc atcccgaaac gccctggacg cagggcccaa |
| 721 | gactgggcac aggagtggga ggtacatggg gctggggact ccccaggagt tatctgctcc |
| 781 | ctgcaggcct agagaagttt cagggaaggt cagaagagct cctggctgtg gtgggcaggg |
| 841 | caggaaaccc ctccaccttt acacatgccc aggcagcacc tcaggccctt tgtggggcag |
| 901 | ggaagctgag gcagtaagcg ggcaggcaga gctggaggcc tttcaggccc agccagcact |
| 961 | ctggcctcct gccgccgcat tccaccccag cccctcacac cactcgggag agggacatcc |
| 1021 | tacggtccca aggtcaggag ggcagggctg gggttgactc aggcccctcc cagctgtggc |
| 1081 | cacctgggtg ttgggagggc agaagtgcag gcacctaggg ccccccatgt gcccaccctg |
| 1141 | ggagctctcc ttggaaccca ttcctgaaat tatttaaagg ggttggccgg gctcccacca |
| 1201 | gggcctgggt gggaaggtac aggcgttccc ccggggccta gtacccccgc cgtggcctat |
| 1261 | ccactcctca catccacaca ctgcaccccc actcctgggg cagggccacc agcatccagg |
| 1321 | cggccagcag gcacctgagt ggctgggaca agggatcccc cttccctgtg gttctattat |
| 1381 | attataatta taattaaata tgagagcatg ctaagga (SEQ ID NO: 792) |

[0118] In some aspects, the invention provides a modified primary human. T cell or population thereof, each cell comprising a modified genome comprising: (b) a genomic modification (e.g., a second genomic modification) in which the PD1 gene on chromosome 2 has been edited to delete a contiguous stretch (e.g., a second contiguous stretch) of genomic DNA, thereby reducing or eliminating PD1 receptor surface expression and/or activity in the cell, wherein the contiguous stretch (e.g., second contiguous stretch) of genomic DNA has been deleted by contacting the cell with a Cas protein or a nucleic acid encoding the Cas protein and a pair of ribonucleic acids (e.g., second pair) having sequences selected from the group consisting of SEQ ID NOs: 196-531 and 4047-8945. In some embodiments, the second pair of ribonucleic acids comprises SEQ ID NO: 462 and SEQ ID NO: 421.

[0119] In some aspects, the invention provides a method for altering a target PD1 polynucleotide sequence in a cell comprising contacting the PD1 polynucleotide sequence with a clustered regularly interspaced short palindromic repeats-associated (Cas) protein and from one to two ribonucleic acids, wherein the ribonucleic acids direct Cas protein to and hybridize to a target motif of the target PD1 polynucleotide sequence, wherein the target PD1 polynucleotide sequence is cleaved, and wherein at least one of the one to two ribonucleic acids are selected from the group consisting of SEQ ID NOs. 196-531 and 4047-8945. In some embodiments, each of the one to two ribonucleic acids is selected from the group consisting of SEQ ID NOs: 196-531 and 4047-8945. In some embodiments, the two ribonucleic acids comprise SEQ ID NO: 462 and SEQ ID NO: 421.

[0120] In some aspects, the invention provides a modified primary human T cell or population thereof, each cell comprising a modified genome comprising: (b) a genomic modification (e.g., a second genomic modification) in which the PD1 gene on chromosome 2 has been edited to reduce or eliminate PD1 receptor surface expression and/or activity in the cell by contacting the cell with a Cas protein or a nucleic acid encoding the Cas protein and at least one ribonucleic acid having a sequence selected from the group consisting of SEQ ID NOs: 8946-9101.

[0121] In some aspects, the invention provides a method for altering a target PD1 polynucleotide sequence in a cell comprising contacting the PD1 polynucleotide sequence with a clustered regularly interspaced short palindromic repeats-associated (Cas) protein and at least one ribonucleic acid, wherein the ribonucleic acid directs Cas protein to and hybridizes to a target motif of the target PD1 polynucleotide sequence, wherein the target PD1 polynucleotide sequence is cleaved, and wherein the at least one ribonucleic acid is selected from the group consisting of SEQ ID NOs. 8946-9101. In certain aspects, a subsequent alteration to the target PD1 polynucleotide sequence in the cell results in a second cleavage of the target PD1 polynucleotide sequence, thereby editing the target PD1 polynucleotide sequence to delete a second contiguous stretch of genomic DNA.

[0122] T Cell Receptor Alpha Chain (TCRA) and T Cell Receptor Beta Chain (TCRB) Loci

[0123] In some embodiments, the target polynucleotide sequence is T cell receptor alpha locus (TCRA), or a homolog, ortholog, or variant thereof (Gene ID: 5133, also known as IMD7, TCRD, TRA@, TRAC, and referred to herein as TCRa, TCRA, TCRalpha, and the like). An exemplary TCRA human target polynucleotide sequence is NCBI Reference Sequence: NC_000014.9. In some embodiments, the target polynucleotide is T cell receptor alpha locus (TCRB), or a homolog, ortholog, or variant thereof (Gene ID: 6957, also known as TCRB; TRB@, and referred to herein as TCRb, TCRB, TCRbeta, and the like). Antigen recognition by T-lymphocytes occurs via a mechanism that is similar to the one used immunoglobulins made by B cells. Two main mature T-cell subtypes exist, namely those expressing alpha and beta chains, and those expressing gamma and delta chains. In contrast to secreted Ig molecules, T-cell receptor chains are membrane bound and function through cell-cell contact. T-cell receptor alpha chain encoding genes are grouped on chromosome 14.

[0124] The T-cell receptor alpha chain is formed when one of at least 70 variable (V) genes encoding the N-terminal antigen recognition domain rearranges to one of 61 joining (J) gene segments to form a functional V region exon that is transcribed and spliced to a constant region gene (TRAC) segment that encodes the C-terminal portion. The T-cell receptor beta chain is formed when one of 52 variable (V) genes encoding the N-terminal antigen recognition domain rearranges to a diversity (D) gene and a joining (J) gene to form a functional V region exon that is transcribed and spliced to a constant (C) region gene segment encoding the C-terminal portion. In contrast to the alpha chain locus, the beta chain locus has two separate gene clusters after the V genes, each containing a D gene, several J genes, and a C gene. Following their synthesis the alpha and beta chains combine to produce the alpha-beta T-cell receptor heterodimer (Janeway et. al., 2005).

[0125] In some aspects, the present disclosure provides a modified primary human cell (e.g., immune cell, e.g., T cell, natural killer cell, etc.) or population thereof comprising a genome in which the TCR alpha chain locus on chromosome 14 has been edited to reduce or eliminate TCR expression (e.g., cell surface expression) and/or activity (e.g., protein activity) in the cell or population thereof using a genetic editing system (e.g., TALENs, CRISPR/Cas, etc.). In some aspects, the present disclosure provides a modified primary human cell (e.g., immune cell, e.g., T cell, natural killer cell, etc.) or population thereof comprising a genome in which the TCR alpha chain locus on chromosome 14 has been edited to delete a contiguous stretch of genomic DNA, e.g., comprising a coding exon, thereby reducing or eliminating TCR expression (e.g., cell surface expression) and/or activity (e.g., protein activity) in the cell or population thereof. The contiguous stretch of genomic DNA can be deleted by contacting a primary human cell (e.g., immune cell, e.g., T cell, natural killer cell, etc.) or population thereof with a Cas protein or a nucleic acid sequence encoding the Cas protein and at least one pair of ribonucleic acids (i.e., CRISPR TCRA gRNA pairs, e.g., at least one gRNA pair, at least two gRNA pairs, at least three gRNA pairs, at least four gRNA pairs, at least five gRNA pairs, etc.) selected from the group consisting of SEQ ID NOs: 532-609 and 9102-9750.

[0126] In some aspects, the present disclosure provides a modified primary human cell (e.g., immune cell, e.g., T cell, natural killer cell, etc.) or population thereof comprising a genome in which the TCR beta chain locus on chromosome 7 has been edited to reduce or eliminate TCR expression (e.g., cell surface expression) and/or activity (e.g., protein activity) in the cell or population thereof using a genetic editing system (e.g., TALENs, CRISPR/Cas, etc.). In some aspects, the present disclosure provides a modified primary human cell (e.g., immune cell, e.g., T cell, natural killer cell, etc.) or population thereof comprising a genome in which the TCR beta chain locus on chromosome 7 has been edited to delete a contiguous stretch of genomic DNA, e.g., comprising a coding exon, thereby reducing or eliminating TCR expression (e.g., cell surface expression) and/or activity (e.g., protein activity) in the cell or population thereof. The contiguous stretch of genomic DNA can be deleted by contacting a primary human cell (e.g., immune cell, e.g., T cell, natural killer cell, etc.) or population thereof with a Cas protein or a nucleic acid sequence encoding the Cas protein and at least one pair of ribonucleic acids (i.e., CRISPR TCRA gRNA pairs, e.g., at least one gRNA pair, at least two gRNA pairs, at least three gRNA pairs, at least four gRNA pairs, at least five gRNA pairs, etc.) selected from the group consisting of SEQ ID NOs: 610-765 and 9798-10532.

[0127] The present disclosure contemplates reducing or eliminating TCR expression and/or activity in any cell line or primary human cell (e.g., immune cell, e.g., T cell, natural killer cell, etc.) population thereof to produce cells which reduce or eliminate autoreactivity. The present disclosure further contemplates genomically editing primary human cells to cleave TCR alpha chain locus and/or TCR beta chain locus sequences, as well as editing the genome of such cells to alter one or more additional target polynucleotide sequences (e.g., CTLA4, PD1, and/or B2M). It should be appreciated that cleaving a TCR alpha chain locus sequence and/or TCR beta chain locus sequence using one or more gRNAs or gRNA pairs described herein and a Cas protein can result in partial or complete deletion of the target TCR alpha chain locus and/or TCR beta chain locus DNA sequence (e.g., coding exon, e.g., first coding exon).

[0128] In some aspects, the invention provides a modified primary human T cell or population thereof, each cell comprising a modified genome comprising: (c)(i) a genomic modification (e.g., a third genomic modification) in which the TCR alpha chain locus on chromosome 14 has been edited to delete a contiguous stretch (e.g., third contiguous stretch) of genomic DNA comprising at least a portion of a coding exon, and/or (c)(ii) a genomic modification (e.g., a fourth genomic modification) in which the TCR beta chain locus on chromosome 7 has been edited to delete a contiguous stretch (e.g., fourth contiguous stretch) of genomic DNA comprising at least a portion of a coding exon, wherein deletion of the contiguous stretch of genomic DNA from the TCR alpha chain locus on chromosome 14 and/or deletion of the contiguous stretch of genomic DNA from the TCR beta chain locus on chromosome 7 reduces or eliminates TCR surface expression and/or TCR activity in the cell or population thereof.

[0129] In some aspects, the invention provides a modified primary human T cell or population thereof, each cell comprising a modified genome comprising: (c)(i) a genomic modification (e.g., a third genomic modification) in which the TCR alpha chain locus on chromosome 14 has been edited to delete a contiguous stretch (e.g., a third contiguous stretch) of genomic DNA, thereby reducing or eliminating TCR surface expression and/or activity in the cell. In some embodiments, the contiguous stretch (e.g., third contiguous stretch) of genomic DNA has been deleted by contacting the cell with a Cas protein or a nucleic acid sequence encoding the Cas protein and a pair of ribonucleic acids (e.g., third pair) having sequences selected from the group consisting of SEQ ID NOs: 532-609 and 9102-9750. In some embodiments, the third pair of ribonucleic acids comprises SEQ ID NO: 550 and SEQ ID NO: 573.

[0130] In some aspects, the invention provides a modified primary human T cell or population thereof, each cell comprising a modified genome comprising: (e)(ii) a genomic modification (e.g., a fourth genomic modification) in which the TCR beta chain locus on chromosome 7 has been edited to delete a contiguous stretch (e.g., a fourth contiguous stretch) of genomic DNA, thereby reducing or eliminating TCR surface expression and/or activity in the cell. In some embodiments, the contiguous stretch (e.g., fourth contiguous stretch) of genomic DNA has been deleted by contacting the cell with a Cas protein or a nucleic acid sequence encoding the Cas protein and a pair of ribonucleic acids (e.g., fourth pair) having sequences selected from the group consisting of SEQ ID NOs: 610-765 and 9798-10532. In some embodiments, the fourth pair of ribonucleic acids comprises SEQ ID NO: 773 and SEQ ID NO: 778.

[0131] In some aspects, the invention provides a method for altering a target TRCA polynucleotide sequence in a cell comprising contacting the TCRA polynucleotide sequence with a clustered regularly interspaced short palindromic repeats-associated (Cas) protein and from one to two ribonucleic acids, wherein the ribonucleic acids direct Cas protein to and hybridize to a target motif of the target TCRA polynucleotide sequence, wherein the target TCRA polynucleotide sequence is cleaved, and wherein at least one of the one to two ribonucleic acids are selected from the group consisting of SEQ ID NOs. 532-609 and 9102-9750. In some embodiments, each of the one to two ribonucleic acids is selected from the group consisting of SEQ ID NOs: 532-609 and 9102-9750. In some embodiments, the two ribonucleic acids comprise SEQ ID NO: 550 and SEQ ID NO: 573.

[0132] In some aspects, the invention provides a method for altering a target TRCB polynucleotide sequence in a cell comprising contacting the TCRB polynucleotide sequence with a clustered regularly interspaced short palindromic repeats-associated (Cas) protein and from one to two ribonucleic acids, wherein the ribonucleic acids direct Cas protein to and hybridize to a target motif of the target TCRB polynucleotide sequence, wherein the target TCRB polynucleotide sequence is cleaved, and wherein at least one of the one to two ribonucleic acids are selected from the group consisting of SEQ ID NOs. 610-765 and 9798-10321. In some embodiments, each of the one to two ribonucleic acids is selected from the group consisting of SEQ ID NOs: 610-765 and 9798-10321. In some embodiments, the two ribonucleic acids comprise SEQ ID NO: 657 and SEQ ID NO: 662.

[0133] In some aspects, the invention provides a modified primary human T cell or population thereof, each cell comprising a modified genome comprising: (c)(i) a genomic modification (e.g., a third genomic modification) in which the TCR alpha chain locus on chromosome 14 has been edited to reduce or eliminate TCR surface expression and/or activity in the cell. In some embodiments, the third genomic modification occurs by contacting the cell with a Cas protein or a nucleic acid sequence encoding the Cas protein and at least one ribonucleic acid having a sequence selected from the group consisting of SEQ ID NOs: 9751-9797.

[0134] In some aspects, the invention provides a modified primary human T cell or population thereof, each cell comprising a modified genome comprising: (c)(ii) a genomic modification (e.g., a fourth genomic modification) in which the TCR beta chain locus on chromosome 7 has been edited to reduce or eliminate TCR surface expression and/or activity in the cell. In some embodiments, the fourth genomic modification occurs by contacting the cell with a Cas protein or a nucleic acid sequence encoding the Cas protein and at least one ribonucleic acid having a sequence selected from the group consisting of SEQ ID NOs: 10533-10573.

[0135] In some aspects, the invention provides a method for altering a target TRCA polynucleotide sequence in a cell comprising contacting the TCRA polynucleotide sequence with a clustered regularly interspaced short palindromic repeats-associated (Cas) protein and at least one ribonucleic acid, wherein the ribonucleic acid directs Cas protein to and hybridizes to a target motif of the target TCRA polynucleotide sequence, wherein the target TCRA polynucleotide sequence is cleaved, and wherein the at least one ribonucleic acid is selected from the group consisting of SEQ ID NOs. 9751-9797. In certain aspects, a subsequent alteration to the target TRCA polynucleotide sequence in the cell results in a second cleavage of the target TRCA polynucleotide sequence, thereby editing the target TRCA polynucleotide sequence to delete a third contiguous stretch of genomic DNA.

[0136] In some aspects, the invention provides a method for altering a target TRCB polynucleotide sequence in a cell comprising contacting the TCRB polynucleotide sequence with a clustered regularly interspaced short palindromic repeats-associated (Cas) protein and at least one ribonucleic acid, wherein the ribonucleic acid directs Cas protein to and hybridizes to a target motif of the target TCRB polynucleotide sequence, wherein the target TCRB polynucleotide sequence is cleaved, and wherein the at least one ribonucleic acid is selected from the group consisting of SEQ ID NOs. 10533-10573. In certain aspects, a subsequent alteration to the target TRCB polynucleotide sequence in the cell results in a second cleavage of the target TRCB polynucleotide sequence, thereby editing the target TRCB polynucleotide sequence to delete a fourth contiguous stretch of genomic DNA.

[0137] Beta-2-Microglobulin (B2M)

[0138] In some embodiments, the target polynucleotide sequence is beta-2-microglobulin (B2M; Gene ID: 567). The B2M polynucleotide sequence encodes a serum protein associated with the heavy chain of the major histocompatibility complex (MHC) class I molecules which are expressed on the surface of virtually all nucleated cells. B2M protein comprises a beta-pleated sheet structure that has been found to form amyloid fibrils in certain pathological conditions. The B2M gene has 4 exons which span approximately 8 kb. B2M has been observed in the serum of normal individuals and in elevated amounts in urine from patients having Wilson disease, cadmium poisoning, and various conditions leading to renal tubular dysfunction. Other pathological conditions known to be associated with B2M include, without limitation, a homozygous mutation (e.g., ala11pro) in the B2M gene has been reported in individuals having familial hypercatabolic hypoproteinemia, a heterozygous mutation (e.g., asp76asn) in the B2M gene has been reported in individuals having familial visceral amyloidosis.

[0139] In some embodiments, the target polynucleotide sequence is a variant of B2M. In some embodiments, the target polynucleotide sequence is a homolog of B2M. In some embodiments, the target polynucleotide sequence is an ortholog of B2M.

[0140] In some aspects, the present disclosure provides a modified primary human cell (e.g., immune cell, e.g., T cell, natural killer cell, etc.) or population thereof comprising a genome in which the β2-microglobulin (B2M) gene on chromosome 15 has been edited to reduce or eliminate surface expression of MHC class I molecules in the cell or population thereof using a genetic editing system (e.g., TALENs, CRISPR/Cas, etc.). In some aspects, the present disclosure provides a modified primary human T cell or population thereof comprising a genome in which the B2M gene on chromosome 15 has been edited to delete a contiguous stretch of genomic DNA of NCBI Reference Sequence: NG_012920.1, thereby reducing or eliminating surface expression of MHC class I molecules in the cell or population thereof. The contiguous stretch of genomic DNA can be deleted by contacting the cell or population thereof with a Cas protein or a nucleic acid sequence encoding the Cas protein and at least one ribonucleic acid or at least one pair of ribonucleic acids selected from the group consisting of SEQ ID NOs: 766-780 and 10574-13719.

[0141] The present disclosure contemplates ablating MHC class I molecule surface expression in any cell line or primary human cell population (e.g., immune cells, e.g., T cells, natural killer cells, etc.) to produce cells which reduce or eliminate the likelihood of triggering unwanted host immune responses when transplanted (e.g., allogeneic transplantation). B2M is an accessory chain of the MHC class I proteins which is necessary for the expression of MHC class I proteins on the surface of cells. It is believed that engineering cells (e.g., mutant cells) devoid of surface MHC class I may reduce the likelihood that the engineered cells will be detected by cytotoxic T cells when the engineered cells are administered to a host. Accordingly, in some embodiments, cleavage of the target polynucleotide sequence encoding B2M in the cell or population of cells reduces the likelihood that the resulting cell or cells will trigger a host immune response when the cells are administered to the subject.

[0142] The present invention contemplates genomically editing primary human cells to cleave B2M gene sequences, as well as editing the genome of such cells to alter one or more additional target polynucleotide sequences (e.g., CTLA4, PD1, TCRA, and/or TCRB). It should be appreciated that cleaving a B2M genomic sequence using one or more gRNAs or gRNA pairs described herein and a Cas protein can result in partial or complete deletion of the target B2M genomic sequence.

[0143] In some aspects, the invention provides a modified primary human T cell or population thereof, each cell comprising a modified genome comprising: (d) a genomic modification (e.g., a fifth genomic modification) in which the B2M gene on chromosome 15 has been edited to delete a contiguous stretch (e.g., fifth contiguous stretch) of genomic DNA, thereby reducing or eliminating MHC Class I molecule surface expression and/or activity in the cell. In some embodiments, the contiguous stretch (e.g., fifth contiguous stretch) of genomic DNA has been deleted by contacting the cell with a Cas protein or a nucleic acid sequence encoding the Cas protein and a pair of ribonucleic acids (e.g., fifth pair) having sequences selected from the group consisting of SEQ ID NOs: 766-780 and 10574-13257. In some embodiments, the fifth pair of ribonucleic acids comprises SEQ ID NO: 773 and SEQ ID NO: 778.

[0144] In some aspects, the invention provides a method for altering a target B2M polynucleotide sequence in a cell comprising contacting the B2M polynucleotide sequence with a clustered regularly interspaced short palindromic repeats-associated (Cas) protein and from one to two ribonucleic acids, wherein the ribonucleic acids direct Cas protein to and hybridize to a target motif of the target B2M polynucleotide sequence, wherein the target B2M polynucleotide sequence is cleaved, and wherein at least one of the one to two ribonucleic acids are selected from the group consisting of SEQ ID NOs. 766-780 and 10574-13257. In some embodiments, each of the one to two ribonucleic acids is selected from the group consisting of SEQ ID NOs: 766-780 and 10574-13257. In some embodiments, the fifth pair of ribonucleic acids comprises SEQ ID NO: 773 and SEQ ID NO: 778.

[0145] In some aspects, the invention provides a modified primary human T cell or population thereof, each cell comprising a modified genome comprising: (d) a genomic modification (e.g., a fifth genomic modification) in which the B2M gene on chromosome 15 has been edited to reduce or eliminate MHC Class I molecule surface expression and/or activity in the cell. In some embodiments, the fifth genomic modification occurs by contacting the cell with a Cas protein or a nucleic acid sequence encoding the Cas protein and at least one ribonucleic acid having a sequence selected from the group consisting of SEQ ID NOs: 13258-13719.

[0146] In some aspects, the invention provides a method for altering a target B2M polynucleotide sequence in a cell comprising contacting the B2M polynucleotide sequence with a clustered regularly interspaced short palindromic repeats-associated (Cas) protein and at least one ribonucleic acid, wherein the ribonucleic acid directs Cas protein to and hybridizes to a target motif of the target B2M polynucleotide sequence, wherein the target B2M polynucleotide sequence is cleaved, and wherein the at least one ribonucleic acid is selected from the group consisting of SEQ ID NOs. 13258-13719. In certain aspects, a subsequent alteration to the target B2M polynucleotide sequence in the cell results in a second cleavage of the target B2M polynucleotide sequence, thereby editing the target B2M polynucleotide sequence to delete a fifth contiguous stretch of genomic DNA.

[0147] Chimeric Antigen Receptors

[0148] Aspects of the present invention relate to primary human cells modified to include a chimeric antigen receptor. Chimeric Antigen Receptors (CARs) are molecules designed to target immune cells to specific molecular targets expressed on cell surfaces. In their most basic form, they are receptors introduced to a cell that couple a specificity domain expressed on the outside of the cell to signaling pathways on the inside of the cell such that when the specificity domain interacts with its target, the cell becomes activated. Often CARs are made from variants of T-cell receptors (TCRs) where a specificity domain such as a scFv or some type of receptor is fused to the signaling domain of a TCR. These constructs are then introduced into a T-cell allowing the T-cell to become activated in the presence of a cell expressing the target antigen, resulting in the attack on the targeted cell by the activated T-cell in a non-MHC dependent manner (see Chicaybam et al (2011) Int Rev Immunol 30:294-311). Currently, tumor specific CARs targeting a variety of tumor antigens are being tested in the clinic for treatment of a variety of different cancers. Examples of these cancers and their antigens that are being targeted includes follicular lymphoma (CD20 or GD2), neuroblastoma (CD171), non-Hodgkin lymphoma (CD20), lymphoma (CD19), glioblastoma (IL13Rα2), chronic lymphocytic leukemia or CLL and acute lymphocytic leukemia or ALL (both CD19). Virus specific CARs have also been developed to attack cells harboring virus such as HIV. For example, a clinical trial was initiated using a CAR specific for Gp100 for treatment of HIV (Chicaybam, ibid).

[0149] As used herein, a “chimeric antigen receptor” (CAR) is an artificially constructed hybrid protein or polypeptide comprising a specificity or recognition (i.e. binding) domain linked to an immune receptor responsible for signal transduction in lymphocytes. The binding domain is typically derived from a Fab antibody fragment that has been fashioned into a single chain scFv via the introduction of a flexible linker between the antibody chains within the specificity domain. Other possible specificity domains can include the signaling portions of hormone or cytokine molecules, the extracellular domains of receptors, and peptide ligands or peptides isolated by library (e.g. phage) screening (see Ramos and Dotti, (2011) Expert Opin Bio Ther 11(7): 855). Flexibility between the signaling and the binding portions of the CAR may be a desirable characteristic to allow for more optimum interaction between the target and the binding domain, so often a hinge region is included. One example of a structure that can be used is the CH2-CH3 region from an immunoglobulin such as an IgG molecule. The signaling domain of the typical CAR comprises intracellular domains of the TCR-CD3 complex such as the zeta chain. Alternatively, the γ chain of an Fe receptor may be used. The transmembrane portion of the typical CAR can comprise transmembrane portions of proteins such as CD4, CD8 or CD28 (Ramos and Dotti, ibid). Characteristics of some CARs include their ability to redirect T-cell specificity and reactivity toward a selected target in a non-MHC-restricted manner. The non-MHC-restricted target recognition gives T-cells expressing CARs the ability to recognize a target independent of antigen processing, thus bypassing a major mechanism of tumor escape.

[0150] At least three different generations of chimeric antigen receptors contemplated for use in the modified cells, compositions, methods, and kits of the present invention are shown in FIG. 2. The so called “first generation” CARs often comprise a single internal signaling domain such as the CD3 zeta chain, and are thought to be somewhat ineffectual in the clinic, perhaps due to incomplete activation. To increase performance of T-cells bearing these CARs, second generation CARs have been generated with the ability of proving the T-cell additional activation signals by including another stimulatory domain, often derived from the intercellular domains of other receptors such as CD28, CD134/OX40, CD137/4-1BB, Lck, ICOS and DAP10. Additionally, third generation CARs have also been developed wherein the CAR contains three or more stimulatory domains (Ramos and Dotti, ibid). In some instances, CAR can comprise an extracellular hinge domain, transmembrane domain, and optionally, an intracellular hinge domain comprising CD8 and an intracellular T-cell receptor signaling domain comprising CD28; 4-1BB, and CD3ζ CD28 is a T-cell marker important in T-cell co-stimulation. CD8 is also a T-cell marker. 4-1BB transmits a potent costimulatory signal to T-cells, promoting differentiation and enhancing long-term survival of T lymphocytes. CD3ζ associates with TCRs to produce a signal and contains immunoreceptor tyrosine-based activation motifs (ITAMs). In other instances, CARs can comprise an extracellular hinge domain, transmembrane domain, and intracellular T-cell signaling domain comprising CD28 and CD3ζ In further instances, CARs can comprise an extracellular hinge domain and transmembrane domain comprising CD8 and an intracellular T-cell receptor signaling domain comprising CD28 and CD3ζ.

[0151] In some embodiments, the modified primary human cells (e.g., immune cells, e.g., T cells, natural killer cells, etc.) further comprise a chimeric antigen receptor or an exogenous nucleic acid encoding the chimeric antigen receptor. The chimeric antigen receptor specifically binds to an antigen or epitope of interest expressed on the surface of at least one of a damaged cell, a dysplastic cell, an infected cell, an immunogenic cell, an inflamed cell, a malignant cell, a metaplastic cell, a mutant cell, and combinations thereof. Numerous cancer antigens are known in the art and may be targeted by specific CARs. By way of non-limiting examples, see Table 5 for tumor associated antigens that may be targeted by CARs (see Ramos and Dotti, ibid, and Orentas et al (2012), Front in Oncol 2:1).

TABLE 5
Tumor associated antigens suitable for CAR targeting

| Tumor type | Antigen | Description |
|---|---|---|
| Gastrointenstinal | EGP2/EpCam | Epithelial glycoprotein 2/Epithelial cell |
| | | adhesion molecule |
| Gastrointenstinal | EGP40 | Epithelial glycoprotein 40 |
| Gastrointenstinal | TAG72/CA72-4 | Tumor associated glycoprotein 72/cancer |
| | | antigen 72-4 |
| Glioblastoma | IL13Rα2 | Interleukin 13 receptor alpha-2 subunit |
| Kidney | G250/MN/CA IX | Carbonic anhydrase IX |
| Lymphoid malignancies | CD19 | |
| Lymphoid malignancies | CD52 | |
| Lymphoid malignancies | CD33 | |
| Lymphoid malignancies | CD20 | Membrane-spanning 4-domains subfamily A |
| | | member 1 |
| Lymphoid malignancies | TSLPR (CRLF2) | |
| Lymphoid malignancies | CD22 | Sialic acid-binding Ig-like lectin 2 |
| Lymphoid malignancies | CD30 | TNF receptor superfamily member 8 |
| Lymphoid malignancies | κ | Kappa light chain |
| Melanoma | GD3 | GD3-Ganglioside |
| Melanoma | HLA-A1 + | Human leukocyte antigen A1 + Melanoma |
| | MAGE-1 | antigen 1 |
| Neuroblastoma/Neural | CD171 | L1 cell adhesion molecule |
| tumors | | |
| Neuroblastoma/Neural | ALK | Anaplastic lymphoma kinase |
| tumors | | |
| Neuroblastoma/Neural | GD2 | GD2-Ganglioside |
| tumors | | |
| Neuroblastoma/Neural | CD47 | |
| tumors | | |
| Neuroblastoma/Neural | EGFRvIII | |
| tumors | | |
| Neuroblastoma/Neural | NCAM | Neural cell adhesion molecule |
| tumors | | |
| Ovary | FBP/αFR | Folate binding protein/alpha folate receptor |
| Ovary | Le(Y) | Lewis-Y antigen |
| Ovary | MUC1 | Mucin 1 |
| Prostate | PSCA | Prostate stem cell antigen |
| Prostate | PSMA | Prostate-specific membrane antigen |
| Rhadbomyosarcoma | FGFR4 | Fibroblast growth factor receptor 4 |
| Rhadbomyosarcoma | FAR | Fetal acetylcholine receptor |
| Several solid tumors | CEA | Carcinoembryonic antigen |
| Several solid tumors | ERBB2/HER2 | Avian ertyroblastic leukemia viral oncogene |
| | | homolog 2/Human epidermal growth factor |
| | | receptor 2 |
| Several solid tumors | ERBB3 + ERBB4 | Avian erthroblastic leukemia viral oncogene |
| | | homology 3 + 4 |
| Several solid tumors | Mesothelin | |
| Various tumors | CD44v6 | Hyaluronate receptor variant 6 |
| Various tumors | B7-H3 | Adhesion receptor |
| Various tumors | Glypican-3,5 | Cell surface peptidoglycan |
| Various tumors | ROR1 | |
| Various tumors | Survivin | Anti-apoptotic molecule |
| Various tumors | FOLR1 | a folate receptor |
| Various tumors | WT1 | Wilm's tumor antigen |
| Various tumors | CD70 | |
| Various tumors | VEGFR2/FLK/KDR | Vascular endothelial growth factor 2/Fetal |
| | | liver kinase 1/Kinase domain insert |

[0152] In some embodiments, the CARs may have specificity for a tumor antigen where the CAR specificity domain is a ScFv: In other embodiments, CARS may be specific for a tumor antigen where the CAR specificity domain comprises a ligand or polypeptide. Non-limiting exemplary CARs include those targeted to CD33 (see Dutour et al, (2012) Adv Hematol 2012; 2012:683065), GD2 (Louis et al (2011) Blood 118(23):650-6), CD19 (Savoldo et al, (2011) J Clin Invest 121(5): 1822 and Torikai et al (2012) Blood 119(24): 5697), IL-11Rα (Huang et al, (2012) Cancer Res 72(1):271-81), CD20 (Till et al (2012) Blood 119(17):3940-50), NY-ESO-1 (Schuberth et al, (2012) Gene Ther doi:10.1038/gt2012.48), ErbB2 (Zhao et al, (2009) J. Immunol 183(9): 5563-74), CD70 (Shaffer et al (2011) Blood 116(16):4304-4314), CD38 (Bhattacharayya et al (2012) Blood Canc J 2(6) p. e75), CD22 (Haso et al. (2012) Canc Res 72(8) S1, doi: 1158/1158-7445 AM2012-3504), CD74 (Stein et al (2004) Blood 104:3705-3711), CAIX (Lamers et al, (2011) Blood 117(1): 72-82) STEAP1 (see Kiessling et al. (2012) Cancers 4:193-217 for review of target) VEGF-R2 (U.S. Patent Publication No. US20120213783A1), the folate receptor (PCT patent publication WO2012099973) and IL-13 Rα (U.S. Pat. No. 7,514,537).

[0153] Exogenous Molecules Delivered Via the Modified Cells

[0154] Aspects of the invention relate to using a modified primary human cell or population thereof of the present invention (e.g., immune cell, e.g., T cell, natural killer cell, etc.) to deliver an exogenous molecule to a cell, tissue, or organ to modulate a biological activity/effect of interest in the cell, tissue, or organ. For example, the modified primary human cell or population thereof can be modified to deliver a therapeutic product (e.g., an immunomodulatory cytokine or antagonist thereof to mediate autoimmune activity, for example toward an anti-inflammatory Th2 type response, e.g., transduction of a T cell hybridoma specific for the peptide MBP 87-99 with a viral vector that constitutively expresses IL-4 to target cells to a myelin protein and inhibit Th1 induction and macrophage activation in active CNS lesions, as described further in Johnson and Tuohy, “Targeting Antigen-Specific T Cells for Gene Therapy of Autoimmune Disease,” Madame Curie Bioscience Database) or regenerative product (e.g., to repair damaged tissue, generate new or artificial tissue, or both, e.g., using modified T cells to deliver nerve growth factor (NGF) to the central nervous system (CNS), platelet-derived growth factor-A (PDGF-A) to treat experimental autoimmune encephalomyelitis (EAE), etc.) to sites of inflammation and tissue destruction, modulate cellular interactions (e.g., modulation of intercellular functions, such as modulation of signaling pathways, apoptosis induction, stopping epitope spreading, tolerance induction, tolerance reversal, and specificity programming, etc.), or to correct its own genetic defects to ameliorate disease (e.g., autoimmune diseases).

[0155] An “exogenous” molecule is a molecule that is not normally present in a cell, but can be introduced into a cell by one or more genetic, biochemical or other methods. “Normal presence in the cell” is determined with respect to the particular developmental stage and environmental conditions of the cell. Thus, for example, a molecule that is present only during embryonic development of neurons is an exogenous molecule with respect to an adult neuron cell. An exogenous molecule can comprise, for example, a functioning version of a malfunctioning endogenous molecule or a malfunctioning version of a normally-functioning endogenous molecule.

[0156] An exogenous molecule can be, among other things, a small molecule, such as is generated by a combinatorial chemistry process, or a macromolecule such as a protein, nucleic acid, carbohydrate, lipid, glycoprotein, lipoprotein, polysaccharide, any modified derivative of the above molecules, or any complex comprising one or more of the above molecules. Nucleic acids include DNA and RNA, can be single- or double-stranded; can be linear, branched or circular; and can be of any length. Nucleic acids include those capable of forming duplexes, as well as triplex-forming nucleic acids. See, for example, U.S. Pat. Nos. 5,176,996 and 5,422,251. Proteins include, but are not limited to, DNA-binding proteins, transcription factors, chromatin remodeling factors, methylated DNA binding proteins, polymerases, methylases, demethylases, acetylases, deacetylases, kinases, phosphatases, integrases, recombinases, ligases, topoisomerases, gyrases and helicases.

[0157] An exogenous molecule can be the same type of molecule as an endogenous molecule, e.g., an exogenous protein or nucleic acid. In such instances, the exogenous molecule is introduced into the cell at greater concentrations than that of the endogenous molecule in the cell. In some instances, an exogenous nucleic acid can comprise an infecting viral genome, a plasmid or episome introduced into a cell, or a chromosome that is not normally present in the cell. Methods for the introduction of exogenous molecules into cells are known to those of skill in the art and include, but are not limited to, lipid-mediated transfer (i.e., liposomes, including neutral and cationic lipids), electroporation, direct injection, cell fusion, particle bombardment, calcium phosphate co-precipitation, DEAE-dextran-mediated transfer and viral vector-mediated transfer.

[0158] In some embodiments, the exogenous molecule comprises a fusion molecule (e.g., fusion protein or nucleic acid). A “fusion” molecule is a molecule in which two or more subunit molecules are linked, preferably covalently. The subunit molecules can be the same chemical type of molecule, or can be different chemical types of molecules. Examples of the first type of fusion molecule include, but are not limited to, fusion proteins (for example, a fusion between a CRISPR DNA-binding domain and a cleavage domain); fusion nucleic acids (for example, a nucleic acid encoding the fusion protein described supra) and fusions between nucleic acids and proteins (e.g., CRISPR/Cas nuclease system). Examples of the second type of fusion molecule include, but are not limited to, a fusion between a triplex-forming nucleic acid and a polypeptide, and a fusion between a minor groove binder and a nucleic acid.

[0159] Expression of a fusion molecule in a cell can result from delivery of the fusion molecule to the cell, for instance for fusion proteins by delivery of the fusion protein to the cell or by delivery of a polynucleotide encoding the fusion protein to a cell, wherein the polynucleotide is transcribed, and the transcript is translated, to generate the fusion protein. Trans-splicing, polypeptide cleavage and polypeptide ligation can also be involved in expression of a protein in a cell. Methods for polynucleotide and/or polypeptide delivery to cells are presented elsewhere in this disclosure.

[0160] A “gene,” for the purposes of the present disclosure, includes a DNA region encoding a gene product (see infra), as well as all DNA regions which regulate the production of the gene product, whether or not such regulatory sequences are adjacent to coding and/or transcribed sequences. Accordingly, a gene includes, but is not necessarily limited to, promoter sequences, terminators, translational regulatory sequences such as ribosome binding sites and internal ribosome entry sites, enhancers, silencers, insulators, boundary elements, replication origins, matrix attachment sites and locus control regions.

[0161] “Gene expression” refers to the conversion of the information, contained in a gene, into a gene product. A gene product can be the direct transcriptional product of a gene (e.g., mRNA, tRNA, rRNA, antisense RNA, ribozyme, structural RNA or any other type of RNA) or a protein produced by translation of an mRNA. Gene products also include RNAs which are modified, by processes such as capping, polyadenylation, methylation, and editing, and proteins modified by, for example, methylation, acetylation, phosphorylation, ubiquitination, ADP-ribosylation, myristilation, and glycosylation.

[0162] “Modulation” of gene expression refers to a change in the expression level of a gene. Modulation of expression can include, but is not limited to, gene activation and gene repression. Modulation may also be complete, i.e. wherein gene expression is totally inactivated or is activated to wildtype levels or beyond; or it may be partial, wherein gene expression is partially reduced, or partially activated to some fraction of wildtype levels. “Eukaryotic” cells include, but are not limited to, fungal cells (such as yeast), plant cells, animal cells, mammalian cells and human cells (e.g., T-cells).

[0163] The terms “operative linkage” and “operatively linked” (or “operably linked”) are used interchangeably with reference to a juxtaposition of two or more components (such as sequence elements), in which the components are arranged such that both components function normally and allow the possibility that at least one of the components can mediate a function that is exerted upon at least one of the other components. By way of illustration, a transcriptional regulatory sequence, such as a promoter, is operatively linked to a coding sequence if the transcriptional regulatory sequence controls the level of transcription of the coding sequence in response to the presence or absence of one or more transcriptional regulatory factors. A transcriptional regulatory sequence is generally operatively linked in cis with a coding sequence, but need not be directly adjacent to it. For example, an enhancer is a transcriptional regulatory sequence that is operatively linked to a coding sequence, even though they are not contiguous.

[0164] With respect to fusion polypeptides, the term “operatively linked” can refer to the fact that each of the components performs the same function in linkage to the other component as it would if it were not so linked. For example, with respect to a fusion polypeptide in which a CasDNA-binding domain is fused to a cleavage domain, the DNA-binding domain and the cleavage domain are in operative linkage if, in the fusion polypeptide, the DNA-binding domain portion is able to bind its target site and/or its binding site, while the cleavage domain is able to cleave DNA in the vicinity of the target site. Similarly, with respect to a fusion polypeptide in which a CasDNA-binding domain is fused to an activation or repression domain, the DNA-binding domain and the activation or repression domain are in operative linkage if, in the fusion polypeptide, the DNA-binding domain portion is able to bind its target site and/or its binding site, while the activation domain is able to upregulate gene expression or the repression domain is able to downregulate gene expression.

[0165] A “functional fragment” of a protein, polypeptide or nucleic acid is a protein, polypeptide or nucleic acid whose sequence is not identical to the full-length protein, polypeptide or nucleic acid, yet retains the same function as the full-length protein, polypeptide or nucleic acid. A functional fragment can possess more, fewer, or the same number of residues as the corresponding native molecule, and/or can contain one or more amino acid or nucleotide substitutions. Methods for determining the function of a nucleic acid (e.g., coding function, ability to hybridize to another nucleic acid) are well-known in the art. Similarly, methods for determining protein function are well-known. For example, the DNA-binding function of a polypeptide can be determined, for example, by filter-binding, electrophoretic mobility-shift, or immunoprecipitation assays. DNA cleavage can be assayed by gel electrophoresis. See Ausubel et al., supra. The ability of a protein to interact with another protein can be determined, for example, by co-immunoprecipitation, two-hybrid assays or complementation, both genetic and biochemical. See, for example, Fields et al. (1989) Nature 340:245-246; U.S. Pat. No. 5,585,245 and PCT WO 98/44350.

[0166] A “vector” is capable of transferring gene sequences to target cells. Typically, “vector construct,” “expression vector,” and “gene transfer vector,” mean any nucleic acid construct capable of directing the expression of a gene of interest and which can transfer gene sequences to target cells. Thus, the term includes cloning, and expression vehicles, as well as integrating vectors.

[0167] A “reporter gene” or “reporter sequence” refers to any sequence that produces a protein product that is easily measured, preferably although not necessarily in a routine assay. Suitable reporter genes include, but are not limited to, sequences encoding proteins that mediate antibiotic resistance (e.g., ampicillin resistance, neomycin resistance, G418 resistance, puromycin resistance), sequences encoding) colored or fluorescent or luminescent proteins (e.g., green fluorescent protein, enhanced green fluorescent protein, red fluorescent protein, luciferase), and proteins which mediate enhanced cell growth and/or gene amplification (e.g., dihydrofolate reductase). Epitope tags include, for example, one or more copies of FLAG, His, myc, Tap, HA or any detectable amino acid sequence. “Expression tags” include sequences that encode reporters that may be operably linked to a desired gene sequence in order to monitor expression of the gene of interest.

[0168] In some embodiments, the modified primary human cell or population thereof further comprises at least one exogenous protein that modulates a biological effect of interest in an adjacent cell, tissue, or organ, or an exogenous nucleic acid encoding the protein.

[0169] Methods for Producing Modified Cells

[0170] Aspects of the invention relate to methods for producing modified primary human cells (e.g., immune cells, e.g., T cells, natural killer cells, etc.). In some embodiments, a method for producing a modified primary human T cell or population thereof includes the step of: (a) editing the cytotoxic T-lymphocyte-associated protein 4 (CTLA4) gene on chromosome 2 in a primary human T cell or population thereof to delete a contiguous stretch (e.g., a first contiguous stretch) of genomic DNA, thereby reducing or eliminating CTLA4 receptor surface expression and/or activity in the cell or population thereof.

[0171] In some embodiments, a method for producing a modified primary human T cell or population thereof includes the step of: (b) editing the programmed cell death 1 (PD1) gene on chromosome 2 in the cell or population thereof to delete a contiguous stretch (e.g., second contiguous stretch) of genomic DNA, thereby reducing or eliminating PD1 receptor surface expression and/or activity in the cell or population thereof.

[0172] In some embodiments, a method for producing a modified primary human T cell or population thereof includes the step of: (c)(i) editing the gene encoding the T cell receptor (TCR) alpha chain locus on chromosome 14 in the cell or population thereof to delete a contiguous stretch (e.g., third contiguous stretch) of genomic DNA, and/or (c)(ii) editing the gene encoding the TCR beta chain locus on chromosome 7 in the cell or population thereof to delete a contiguous stretch (e.g., fourth contiguous stretch) of genomic DNA, thereby reducing or eliminating TCR surface expression and/or activity in the cell or population thereof.

[0173] In some embodiments, a method for producing a modified primary human T cell or population thereof includes the step of: (d) editing the β2-microglobulin (B2M) gene on chromosome 15 in the cell or population thereof to delete a contiguous stretch (e.g., fifth contiguous stretch) of genomic DNA, thereby reducing or eliminating MHC Class I molecule surface expression and/or activity in the cell or population thereof.

[0174] In some embodiments, the steps of editing in (a)-(d) comprises contacting the cell or population thereof with a Cas protein or a nucleic acid sequence encoding the Cas protein, and at least one pair (e.g., a first pair) of guide RNA sequences to delete the contiguous stretch (e.g., first contiguous stretch) of genomic DNA from the gene in (a), at least one pair (e.g., a second pair) of guide RNA sequences to delete the contiguous stretch (e.g., second contiguous stretch) of genomic DNA from the gene in (b), at least one pair (e.g., a third pair) of guide RNA sequences to delete the contiguous stretch (e.g., third contiguous stretch) of genomic DNA from the gene in (c)(i), and/or at least one pair (e.g., a fourth pair) of guide RNA sequences to delete the contiguous stretch (e.g., fourth contiguous stretch) of genomic DNA from the gene in (c)(ii), and at least one pair (e.f., a fifth pair) of guide RNA sequences to delete the contiguous stretch (e.g., fifth contiguous stretch) of genomic DNA from the gene in (d).

[0175] In some embodiments, a method for producing a modified primary human T cell or population thereof optionally includes the step of: (e)(i) causing the cell or population thereof to express at least one chimeric antigen receptor that specifically binds to an antigen or epitope of interest expressed on the surface of at least one of a damaged cell, a dysplastic cell, an infected cell, an immunogenic cell, an inflamed cell, a malignant cell, a metaplastic cell, a mutant cell, and combinations thereof, and/or (e)(ii) causing the cell or population thereof to express at least one protein that modulates a biological effect of interest in an adjacent cell, tissue, or organ.

[0176] In some aspects, the present invention provides a method for producing a modified primary human T cell or population thereof, the method comprising: (a) editing the cytotoxic T-lymphocyte-associated protein 4 (CTLA4) gene on chromosome 2 in a primary human T cell or population thereof to delete a first contiguous stretch of genomic DNA comprising an intron flanked by at least a portion of an adjacent upstream exon and at least a portion of an adjacent downstream exon, and the 3′ end of the genomic DNA upstream with respect to the 5′ end of the deleted first contiguous stretch of genomic DNA is covalently joined to the 5′ end of the genomic DNA downstream with respect to the 3′ end of the deleted first contiguous stretch of genomic DNA to result in a modified CTLA4 gene on chromosome 2 that lacks the first contiguous stretch of genomic DNA, thereby reducing or eliminating CTLA4 receptor surface expression and/or activity in the cell or population thereof; and/or (b) editing the programmed cell death 1 (PD1) gene on chromosome 2 in a primary human T cell or population thereof to delete a second contiguous stretch of genomic DNA comprising an intron flanked by at least a portion of an adjacent upstream exon and at least a portion of an adjacent downstream exon, and the 3′ end of the genomic DNA upstream with respect to the deleted second contiguous stretch of genomic DNA is covalently joined to the 5′ end of the genomic DNA downstream with respect to the 3′ end of the deleted second contiguous stretch of genomic DNA to result in a modified PD1 gene on chromosome 2 that lacks the second contiguous stretch of genomic DNA, thereby reducing or eliminating PD1 receptor surface expression and/or activity in the cell or population thereof.

[0177] In some aspects, the invention provides a method for producing a modified primary human T cell or population thereof, the method comprising: (a) contacting a primary human T cell or population thereof with a Cas protein or a nucleic acid sequence encoding the Cas protein and a first pair of ribonucleic acids having sequences selected from the group consisting of SEQ ID NOs: 1-195 and 797-3637, thereby editing the cytotoxic T-lymphocyte-associated protein 4 (CTLA4) gene on chromosome 2 to delete a first contiguous stretch of genomic DNA, and reduce or eliminate CTLA4 receptor surface expression and/or activity in the cell or population thereof; and/or (b) contacting a primary human T cell or population thereof with the Cas protein or the nucleic acid sequence encoding the Cas protein and a second pair of ribonucleic acids having sequences selected from the group consisting of SEQ ID NOs: 196-531 and 4047-8945, thereby editing the programmed cell death 1 (PD1) gene on chromosome 2 to delete a second contiguous stretch of genomic DNA, and reduce or eliminate PD1 receptor surface expression and/or activity in the cell or population thereof.

[0178] In some embodiments, the first pair of ribonucleic acids comprises SEQ ID NO: 128 and SEQ ID NO: 72, and the second pair of ribonucleic acids comprises SEQ ID NO: 462 and SEQ ID NO: 421.

[0179] In some embodiments, the method for producing a modified primary human T cell or population thereof further comprises: (c)(i) editing the gene encoding the T cell receptor (TCR) alpha chain locus on chromosome 14 in the cell or population thereof to delete a third contiguous stretch of genomic DNA comprising at least a portion of a coding exon, and/or (c)(ii) editing the gene encoding the TCR beta chain locus on chromosome 7 in the cell or population thereof to delete a fourth contiguous stretch of genomic DNA comprising at least a portion of a coding exon, thereby reducing or eliminating TCR surface expression and/or activity in the cell or population thereof. In some embodiments, the editing step in (c)(i) comprises contacting the cell or population thereof with the Cas protein or the nucleic acid sequence encoding the Cas protein and a third pair of ribonucleic acids having sequences selected from the group consisting of SEQ ID NOs: 532-609 and 9102-9750, and/or the editing step in (c)(ii) comprises contacting the cell or population thereof with the Cas protein or the nucleic acid sequence encoding the Cas protein and a fourth pair of ribonucleic acids having sequences selected from the group consisting of SEQ ID NOs: 610-765 and 9798-10532. In some embodiments, the third pair of ribonucleic acids comprises SEQ ID NO: 550 and SEQ ID NO: 573, and/or the fourth pair of ribonucleic acids comprises SEQ ID NO: 657 and SEQ ID NO: 662.

[0180] In some embodiments, the method for producing a modified primary human T cell or population thereof further comprises: (d) editing the β2-microglobulin (B2M) gene on chromosome 15 in the cell or population thereof to delete a fifth contiguous stretch of genomic DNA, thereby reducing or eliminating MHC Class I molecule surface expression and/or activity in the cell or population thereof. In some embodiments, the step of editing in (d) comprises contacting the cell with the Cas protein or the nucleic acid sequence encoding the Cas protein and a fifth pair of ribonucleic acids having sequences selected from the group consisting of SEQ ID NOs: 766-780 and 10574-13257. In some embodiments, the fifth pair of ribonucleic acids comprises SEQ ID NO: 773 and SEQ ID NO: 778.

[0181] In some aspects, the invention provides a method for producing a modified primary human T cell or population thereof, the method comprising: (a) contacting a primary human T cell or population thereof with a Cas protein or a nucleic acid sequence encoding the Cas protein and a first ribonucleic acid having a sequence selected from the group consisting of SEQ ID NOs: 3638-4046, thereby editing the cytotoxic T-lymphocyte-associated protein 4 (CTLA4) gene on chromosome 2 to reduce or eliminate CTLA4 receptor surface expression and/or activity in the cell or population thereof; and/or (b) contacting a primary human T cell or population thereof with the Cas protein or the nucleic acid sequence encoding the Cas protein and a second ribonucleic acid having a sequence selected from the group consisting of SEQ ID NOs: 8946-9101, thereby editing the programmed cell death 1 (PD1) gene on chromosome 2 to reduce or eliminate PD1 receptor surface expression and/or activity in the cell or population thereof.

[0182] In certain aspects, a subsequent alteration to the target TRCB polynucleotide sequence in the cell results in a second cleavage of the target TRCB polynucleotide sequence, thereby editing the target TRCB polynucleotide sequence to delete a fourth contiguous stretch of genomic DNA.

[0183] In some embodiments, the method for producing a modified primary human T cell or population thereof further comprises: (c)(i) editing the gene encoding the T cell receptor (TCR) alpha chain locus on chromosome 14 in the cell or population thereof, and/or (c)(ii) editing the gene encoding the TCR beta chain locus on chromosome 7 in the cell or population thereof, thereby reducing or eliminating TCR surface expression and/or activity in the cell or population thereof. In some embodiments, the editing step in (c)(i) comprises contacting the cell or population thereof with the Cas protein or the nucleic acid sequence encoding the Cas protein and a third ribonucleic acid having a sequence selected from the group consisting of SEQ ID NOs: 9751-9797, and/or the editing step in (c)(ii) comprises contacting the cell or population thereof with the Cas protein or the nucleic acid sequence encoding the Cas protein and a fourth ribonucleic acid having a sequence selected from the group consisting of SEQ ID NOs: 10533-10573.

[0184] In some embodiments, the method for producing a modified primary human T cell or population thereof further comprises: (d) editing the β2-microglobulin (B2M) gene on chromosome 15 in the cell or population thereof, thereby reducing or eliminating MHC Class I molecule surface expression and/or activity in the cell or population thereof. In some embodiments, the step of editing in (d) comprises contacting the cell with the Cas protein or the nucleic acid sequence encoding the Cas protein and a fifth ribonucleic acid having a sequence selected from the group consisting of SEQ ID NOs: 13258-13719.

[0185] In some embodiments, the editing of a gene (e.g., CTLA4, PD1, TCRA, TCRB, and/or B2M), as described herein, results in a cleavage of the polynucleotide sequence of the gene. In certain aspects, a subsequent application of the method for producing a modified primary human T cell causes a second cleavage of the polynucleotide sequence of that gene, thereby deleting a contiguous stretch of genomic DNA.

[0186] In some embodiments, the methods for producing a modified primary human T cell or population thereof further comprise: causing the cell or population thereof to express at least one chimeric antigen receptor that specifically binds to an antigen or epitope of interest expressed on the surface of at least one of a damaged cell, a dysplastic cell, an infected cell, an immunogenic cell, an inflamed cell, a malignant cell, a metaplastic cell, a mutant cell, and combinations thereof.

[0187] In some embodiments, the methods for producing a modified primary human T cell or population thereof further comprise: causing the cell or population thereof to express at least one protein that modulates a biological effect of interest in an adjacent cell, tissue, or organ when the cell or population thereof is in proximity to the adjacent cell, tissue, or organ.

[0188] It should be appreciated that the CRISPR/Cas systems of the present invention can cleave target polynucleotide sequences in a variety of ways. In some embodiments, the target polynucleotide sequence is cleaved such that a double-strand break results. In some embodiments, the target polynucleotide sequence is cleaved such that a single-strand break results.

[0189] The methods of the present invention can be used to alter any target polynucleotide sequence in a cell, as long as the target polynucleotide sequence in the cell contains a suitable target motif that allows at least one ribonucleic acid of the CRISPR/Cas system to direct the Cas protein to and hybridize to the target motif. Those skilled in the art will appreciate that the target motif for targeting a particular polynucleotide depends on the CRISPR/Cas system being used, and the sequence of the polynucleotide to be targeted.

[0190] In some embodiments, the target motif is 17 to 23 bp in length. In some embodiments, the target motif is at least 20 bp in length. In some embodiments, the target motif is a 20-nucleotide DNA sequence. In some embodiments, the target motif is a 17 to 23-nucleotide DNA sequence and immediately precedes an NRG motif. In some aspects, the NRG motif is NGG or NAG. In some embodiments, the target motif is a 20-nucleotide DNA sequence and immediately precedes an NGG motif recognized by the Cas protein. In some embodiments, the target motif is a 20-nucleotide DNA sequence and immediately precedes an NAG motif recognized by the Cas protein. In some embodiments, the target motif is a 20-nucleotide DNA sequence beginning with G and immediately precedes an NGG motif recognized by the Cas protein. In some embodiments, the target motif is G(N)₁₉NGG. In some embodiments, the target motif is (N)₂₀NGG.

[0191] In some embodiments, the target motif is a 17 to 23-nucleotide DNA sequence and immediately precedes an NNGRRT motif. In some embodiments, the target motif is a 20 nucleotide DNA sequence and immediately precedes an NNGRRT motif. In some embodiments, the target motif is a 17 to 23-nucleotide DNA sequence and immediately precedes an NNNRRT motif. In some embodiments, the target motif is a 20 nucleotide DNA sequence and immediately precedes an NNNRRT motif. In some embodiments, the target motif is a 17 to 23-nucleotide DNA sequence and immediately precedes an NNAGAAW motif. In some embodiments, the target motif is a 20 nucleotide DNA sequence and immediately precedes an NNAGAAW motif. In some embodiments, the target motif is a 17 to 23-nucleotide DNA sequence and immediately precedes an NNNNGATT motif. In some embodiments, the target motif is a 20 nucleotide DNA sequence and immediately precedes an NNNNGATT motif. In some embodiments, the target motif is a 17 to 23-nucleotide DNA sequence and immediately precedes an NAAAAC motif. In some embodiments, the target motif is a 20 nucleotide DNA sequence and immediately precedes an NAAAAC motif. In some embodiments, the target motif is a 17 to 23-nucleotide DNA sequence having a 5′ T-rich region (e.g., TTTN motif). In some embodiments, the target motif is a 20 nucleotide DNA sequence having a 5′ T-rich region (e.g., TTTN motif).

[0192] In some embodiments, the target motif is a 17 to 23-nucleotide DNA sequence and immediately precedes an NRG motif (e.g., NGG or NAG) recognized by a S. pyogenes Cas9 protein. In some embodiments, the target motif is a 17 to 23-nucleotide DNA sequence and immediately precedes an NNGRRT motif recognized by a S. aureus Cas9 protein. In some embodiments, the target motif is a 17 to 23-nucleotide DNA sequence and immediately precedes an NNNRRT motif recognized by a S. aureus Cas9 protein. In some embodiments, the target motif is a 17 to 23-nucleotide DNA sequence and immediately precedes an NNAGAAW motif recognized by a S. thermophilus Cas9 protein. In some embodiments, the target motif is a 17 to 23-nucleotide DNA sequence and immediately precedes an NNNNGATT motif recognized by N. meningitides Cas9 protein. In some embodiments, the target motif is a 17 to 23-nucleotide DNA sequence and immediately precedes an NAAAAC motif recognized by T. denticola Cas9 protein. In some embodiments, the target motif is a 17 to 23-nucleotide DNA sequence having a 5′ T-rich region (e.g., TTTN motif) recognized by Acidaminococcus or Lachnospiraceae Cpf1 protein.

[0193] The target motifs of the present invention can be selected to minimize off-target effects of the CRISPR/Cas systems of the present invention. In some embodiments, the target motif is selected such that it contains at least two mismatches when compared with all other genomic nucleotide sequences in the cell. In some embodiments, the target motif is selected such that it contains at least one mismatch when compared with all other genomic nucleotide sequences in the cell. Those skilled in the art will appreciate that a variety of techniques can be used to select suitable target motifs for minimizing off-target effects (e.g., bioinformatics analyses).

[0194] In some embodiments, the target motif comprises a G(N)₁₉NGG or (N)₂₀NGG DNA sequence in the CTLA gene. In some embodiments, the target motif comprises a G(N)₁₉NGG or (N)₂₀NGG DNA sequence in the PD1 gene. In some embodiments, the target motif comprises a G(N)₁₉NGG or (N)₂₀NGG DNA sequence in the TCRA gene. In some embodiments, the target motif comprises a G(N)₁₉NGG or (N)₂₀NGG DNA sequence in the TCRB gene. In some embodiments, the target motif comprises a G(N)₁₉NGG or (N)₂₀NGG DNA sequence in the B2M gene.

[0195] In some embodiments, the target motif comprises a G(N)₁₉NGG or (N)₂₀NGG DNA sequence in SEQ ID NO: 782. In some embodiments, the target motif comprises a G(N)₁₉NGG or (N)₂₀NGG DNA sequence in SEQ ID NO: 783. In some embodiments, the target motif comprises a G(N)₁₉NGG or (N)₂₀NGG DNA sequence in SEQ ID NO: 784. In some embodiments, the target motif comprises a G(N)₁₉NGG or (N)₂₀NGG DNA sequence in SEQ ID NO: 785. In some embodiments, the target motif comprises a G(N)₁₉NGG or (N)₂₀NGG DNA sequence in SEQ ID NO: 786. In some embodiments, the target motif comprises a G(N)₁₉NGG or (N)₂₀NGG DNA sequence in SEQ ID NO: 787. In some embodiments, the target motif comprises a G(N)₁₉NGG or (N)₂₀NGG DNA sequence in SEQ ID NO: 788. In some embodiments, the target motif comprises a G(N)₁₉NGG or (N)₂₀NGG DNA sequence in SEQ ID NO: 789. In some embodiments, the target motif comprises a G(N)₁₉NGG or (N)₂₀NGG DNA sequence in SEQ ID NO: 790. In some embodiments, the target motif comprises a G(N)₁₉NGG or (N)₂₀NGG DNA sequence in SEQ ID NO: 791. In some embodiments, the target motif comprises a G(N)₁₉NGG or (N)₂₀NGG DNA sequence in SEQ ID NO: 792.

[0196] In some embodiments, the target motif or at least a portion of the target motif comprises a DNA sequence selected from the group consisting of SEQ ID NOs: 1-195 and 797-4046. In some embodiments, the target motif or at least a portion of the target motif comprises a DNA sequence selected from the group consisting of SEQ ID NOs: 196-531 and 4047-9101. In some embodiments, the target motif or at least a portion of the target motif comprises a DNA sequence selected from the group consisting of SEQ ID NOs: 532-609 and 9102-9797. In some embodiments, the target motif or at least a portion of the target motif comprises a DNA sequence selected from the group consisting of SEQ ID NOs: 610-765 and 9798-10573. In some embodiments, the target motif or at least a portion of the target motif comprises a DNA sequence selected from the group consisting of SEQ ID NOs: 766-780 and 10574-13719.

[0197] In some embodiments, the target motif comprises a DNA sequence comprising at least two nucleotide mismatches compared to a G(N)₁₉NGG or (N)₂₀NGG DNA sequence in the CTLA gene. In some embodiments, the target motif comprises a DNA sequence comprising at least two nucleotide mismatches compared to a G(N)₁₉NGG or (N)₂₀NGG DNA sequence in the PD1 gene. In some embodiments, the target motif comprises a DNA sequence comprising at least two nucleotide mismatches compared to a G(N)₁₉NGG or (N)₂₀NGG DNA sequence in the TCRA gene. In some embodiments, the target motif comprises a DNA sequence comprising at least two nucleotide mismatches compared to a G(N)₁₉NGG or (N)₂₀NGG DNA sequence in the TCRB gene. In some embodiments, the target motif comprises a DNA sequence comprising at least two nucleotide mismatches compared to a G(N)₁₉NGG or (N)₂₀NGG DNA sequence in the B2M gene.

[0198] In some embodiments, the target motif or at least a portion of the target motif comprises a DNA sequence comprising at least two nucleotide mismatches compared to a G(N)₁₉NGG or (N)₂₀NGG DNA sequence in a DNA sequence selected from the group consisting of SEQ ID NOs: 1-195 and 797-2602. In some embodiments, the target motif or at least a portion of the target motif comprises a DNA sequence comprising at least two nucleotide mismatches compared to a G(N)₁₉NGG or (N)₂₀NGG DNA sequence in a DNA sequence selected from the group consisting of SEQ ID NOs: 196-531 and 4047-8128. In some embodiments, the target motif or at least a portion of the target motif comprises a DNA sequence comprising at least two nucleotide mismatches compared to a G(N)₁₉NGG or (N)₂₀NGG DNA sequence in a DNA sequence selected from the group consisting of SEQ ID NOs: 532-609 and 9102-9545. In some embodiments, the target motif or at least a portion of the target motif comprises a DNA sequence comprising at least two nucleotide mismatches compared to a G(N)₁₉NGG or (N)₂₀NGG DNA sequence in a DNA sequence selected from the group consisting of SEQ ID NOs: 610-765 and 9798-10321. In some embodiments, the target motif or at least a portion of the target motif comprises a DNA sequence comprising at least two nucleotide mismatches compared to a G(N)₁₉NGG or (N)₂₀NGG DNA sequence in a DNA sequence selected from the group consisting of SEQ ID NOs: 766-780 and 10574-12300.

[0199] In some embodiments, the CRISPR/Cas systems of the present invention utilize homology-directed repair to correct target polynucleotide sequences. In some embodiments, subsequent to cleavage of the target polynucleotide sequence, homology-directed repair occurs. In some embodiments, homology-directed repair is performed using an exogenously introduced DNA repair template. The exogenously introduced DNA repair template can be single-stranded or double-stranded. The DNA repair template can be of any length. Those skilled in the art will appreciate that the length of any particular DNA repair template will depend on the target polynucleotide sequence that is to be corrected. The DNA repair template can be designed to repair or replace any target polynucleotide sequence, particularly target polynucleotide sequences comprising disease associated polymorphisms (e.g., SNPs). For example, homology-directed repair of a mutant allele comprising such SNPs can be achieved with a CRISPR/Cas system by selecting two target motifs which flank the mutant allele, and an designing a DNA repair template to match the wild-type allele.

[0200] In some embodiments, a CRISPR/Cas system of the present invention includes a Cas protein or a nucleic acid sequence encoding the Cas protein and at least one to two ribonucleic acids (e.g., gRNAs) that are capable of directing the Cas protein to and hybridizing to a target motif of a target polynucleotide sequence. In some embodiments, a CRISPR/Cas system of the present invention includes a Cas protein or a nucleic acid sequence encoding the Cas protein and at least one pair of ribonucleic acids (e.g., gRNAs) that are capable of directing the Cas protein to and hybridizing to a target motif of a target polynucleotide sequence. As used herein, “protein” and “polypeptide” are used interchangeably to refer to a series of amino acid residues joined by peptide bonds (i.e., a polymer of amino acids) and include modified amino acids (e.g., phosphorylated, glycated, glycosolated, etc.) and amino acid analogs. Exemplary polypeptides or proteins include gene products, naturally occurring proteins, homologs, paralogs, fragments and other equivalents, variants, and analogs of the above.

[0201] In some embodiments, a Cas protein comprises one or more amino acid substitutions or modifications. In some embodiments, the one or more amino acid substitutions comprises a conservative amino acid substitution. In some instances, substitutions and/or modifications can prevent or reduce proteolytic degradation and/or extend the half-life of the polypeptide in a cell. In some embodiments, the Cas protein can comprise a peptide bond replacement (e.g., urea, thiourea, carbamate, sulfonyl urea, etc.). In some embodiments, the Cas protein can comprise a naturally occurring amino acid. In some embodiments, the Cas protein can comprise an alternative amino acid (e.g., D-amino acids, beta-amino acids, homocysteine, phosphoserine, etc.). In some embodiments, a Cas protein can comprise a modification to include a moiety (e.g., PEGylation, glycosylation, lipidation, acetylation, end-capping, etc.).

[0202] In some embodiments, a Cas protein comprises a core Cas protein. Exemplary Cas core proteins include, but are not limited to Cas1, Cas2, Cas3, Cas4, Cas5, Cas6, Cas7, Cas8 and Cas9. In some embodiments, a Cas protein comprises a Cas protein of an E. coli subtype (also known as CASS2). Exemplary Cas proteins of the E. Coli subtype include, but are not limited to Cse1, Cse2, Cse3, Cse4, and Cas5e. In some embodiments, a Cas protein comprises a Cas protein of the Ypest subtype (also known as CASS3). Exemplary Cas proteins of the Ypest subtype include, but are not limited to Csy1, Csy2, Csy3, and Csy4. In some embodiments, a Cas protein comprises a Cas protein of the Nmeni subtype (also known as CASS4). Exemplary Cas proteins of the Nmeni subtype include, but are not limited to Csn1 and Csn2. In some embodiments, a Cas protein comprises a Cas protein of the Dvulg subtype (also known as CASS1). Exemplary Cas proteins of the Dvulg subtype include Csd1, Csd2, and Cas5d. In some embodiments, a Cas protein comprises a Cas protein of the Tneap subtype (also known as CASS7). Exemplary Cas proteins of the Tneap subtype include, but are not limited to, Cst1, Cst2, Cas5t. In some embodiments, a Cas protein comprises a Cas protein of the Hmari subtype. Exemplary Cas proteins of the Hmari subtype include, but are not limited to Csh1, Csh2, and Cas5h. In some embodiments, a Cas protein comprises a Cas protein of the Apern subtype (also known as CASS5). Exemplary Cas proteins of the Apern subtype include, but are not limited to Csa1, Csa2, Csa3, Csa4, Csa5, and Cas5a. In some embodiments, a Cas protein comprises a Cas protein of the Mtube subtype (also known as CASS6). Exemplary Cas proteins of the Mtube subtype include, but are not limited to Csm1, Csm2, Csm3, Csm4, and Csm5. In some embodiments, a Cas protein comprises a RAMP module Cas protein. Exemplary RAMP module Cas proteins include, but are not limited to, Cmr1, Cmr2, Cmr3, Cmr4, Cmr5, and Cmr6.

[0203] In some embodiments, the Cas protein is a Streptococcus pyogenes Cas9 protein or a functional portion thereof. In some embodiments, the Cas protein is a Staphylococcus aureus Cas9 protein or a functional portion thereof. In some embodiments, the Cas protein is a Streptococcus thermophilus Cas9 protein or a functional portion thereof. In some embodiments, the Cas protein is a Neisseria meningitides Cas9 protein or a functional portion thereof. In some embodiments, the Cas protein is a Treponema denticola Cas9 protein or a functional portion thereof. In some embodiments, the Cas protein is Cas9 protein from any bacterial species or functional portion thereof. Cas9 protein is a member of the type II CRISPR systems which typically include a trans-coded small RNA (tracrRNA), endogenous ribonuclease 3 (rnc) and a Cas protein. Cas 9 protein (also known as CRISPR-associated endonuclease Cas9/Csn1) is a polypeptide comprising 1368 amino acids. An exemplary amino acid sequence of a Cas9 protein (SEQ ID NO: 781) is shown in FIG. 4. Cas 9 contains 2 enconuclease domains, including an RuvC-like domain (residues 7-22, 759-766 and 982-989) which cleaves target DNA that is noncomplementary to crRNA, and an HNH nuclease domain (residues 810-872) which cleave target DNA complementary to crRNA. In FIG. 4, the RuvC-like domain is highlighted in yellow and the HNH nuclease domain is underlined.

[0204] In some embodiments, the Cas protein is Cpf1 protein or a functional portion thereof. In some embodiments, the Cas protein is Cpf1 from any bacterial species or functional portion thereof. In some aspects, Cpf1 is a Francisella novicida U112 protein or a functional portion thereof. In some aspects, Cpf1 is a Acidaminococcus sp. BV3L6 protein or a functional portion thereof. In some aspects, Cpf1 is a Lachnospiraceae bacterium ND2006 protein or a function portion thereof. Cpf1 protein is a member of the type V CRISPR systems. Cpf1 protein is a polypeptide comprising about 1300 amino acids. Cpf1 contains a RuvC-like endonuclease domain. Cpf1 cleaves target DNA in a staggered pattern using a single ribonuclease domain. The staggered DNA double-stranded break results in a 4 or 5-nt 5′ overhang.

[0205] As used herein, “functional portion” refers to a portion of a peptide which retains its ability to complex with at least one ribonucleic acid (e.g., guide RNA (gRNA)) and cleave a target polynucleotide sequence. In some embodiments, the functional portion comprises a combination of operably linked Cas9 protein functional domains selected from the group consisting of a DNA binding domain, at least one RNA binding domain, a helicase domain, and an endonuclease domain. In some embodiments, the functional portion comprises a combination of operably linked Cpf1 protein functional domains selected from the group consisting of a DNA binding domain, at least one RNA binding domain, a helicase domain, and an endonuclease domain. In some embodiments, the functional domains form a complex. In some embodiments, a functional portion of the Cas9 protein comprises a functional portion of a RuvC-like domain. In some embodiments, a functional portion of the Cas9 protein comprises a functional portion of the HNH nuclease domain. In some embodiments, a functional portion of the Cpf1 protein comprises a functional portion of a RuvC-like domain.

[0206] It should be appreciated that the present invention contemplates various of ways of contacting a target polynucleotide sequence with a Cas protein (e.g., Cas9). In some embodiments, exogenous Cas protein can be introduced into the cell in polypeptide form. In certain embodiments, Cas proteins can be conjugated to or fused to a cell-penetrating polypeptide or cell-penetrating peptide. As used herein, “cell-penetrating polypeptide” and “cell-penetrating peptide” refers to a polypeptide or peptide, respectively, which facilitates the uptake of molecule into a cell. The cell-penetrating polypeptides can contain a detectable label.

[0207] In certain embodiments, Cas proteins can be conjugated to or fused to a charged protein (e.g., that carries a positive, negative or overall neutral electric charge). Such linkage may be covalent. In some embodiments, the Cas protein can be fused to a superpositively charged GFP to significantly increase the ability of the Cas protein to penetrate a cell (Cronican et al. ACS Chem Biol. 2010; 5(8):747-52). In certain embodiments, the Cas protein can be fused to a protein transduction domain (PTD) to facilitate its entry into a cell. Exemplary PTDs include Tat, oligoarginine, and penetratin. In some embodiments, the Cas9 protein comprises a Cas9 polypeptide fused to a cell-penetrating peptide. In some embodiments, the Cas9 protein comprises a Cas9 polypeptide fused to a PTD. In some embodiments, the Cas9 protein comprises a Cas9 polypeptide fused to a tat domain. In some embodiments, the Cas9 protein comprises a Cas9 polypeptide fused to an oligoarginine domain. In some embodiments, the Cas9 protein comprises a Cas9 polypeptide fused to a penetratin domain. In some embodiments, the Cas9 protein comprises a Cas9 polypeptide fused to a superpositively charged GFP. In some embodiments, the Cpf1 protein comprises a Cpf1 polypeptide fused to a cell-penetrating peptide. In some embodiments, the Cpf1 protein comprises a Cpf1 polypeptide fused to a PTD. In some embodiments, the Cpf1 protein comprises a Cpf1 polypeptide fused to a tat domain. In some embodiments, the Cpf1 protein comprises a Cpf1 polypeptide fused to an oligoarginine domain. In some embodiments, the Cpf1 protein comprises a Cpf1 polypeptide fused to a penetratin domain. In some embodiments, the Cpf1 protein comprises a Cpf1 polypeptide fused to a superpositively charged GFP.

[0208] In some embodiments, the Cas protein can be introduced into a cell containing the target polynucleotide sequence in the form of a nucleic acid encoding the Cas protein (e.g., Cas9 or Cpf1). The process of introducing the nucleic acids into cells can be achieved by any suitable technique. Suitable techniques include calcium phosphate or lipid-mediated transfection, electroporation, and transduction or infection using a viral vector. In some embodiments, the nucleic acid comprises DNA. In some embodiments, the nucleic acid comprises a modified DNA, as described herein. In some embodiments, the nucleic acid comprises mRNA. In some embodiments, the nucleic acid comprises a modified mRNA, as described herein (e.g., a synthetic, modified mRNA).

[0209] In some embodiments, nucleic acids encoding Cas protein and nucleic acids encoding the at least one to two ribonucleic acids are introduced into a cell via viral transduction (e.g., lentiviral transduction).

[0210] In some embodiments, the Cas protein is complexed with one to two ribonucleic acids. In some embodiments, the Cas protein is complexed with two ribonucleic acids. In some embodiments, the Cas protein is complexed with one ribonucleic acid. In some embodiments, the Cas protein is encoded by a modified nucleic acid, as described herein (e.g., a synthetic, modified mRNA).

[0211] The methods of the present invention contemplate the use of any ribonucleic acid that is capable of directing a Cas protein to and hybridizing to a target motif of a target polynucleotide sequence. In some embodiments, at least one of the ribonucleic acids comprises tracrRNA. In some embodiments, at least one of the ribonucleic acids comprises CRISPR RNA (crRNA). In some embodiments, a single ribonucleic acid comprises a guide RNA that directs the Cas protein to and hybridizes to a target motif of the target polynucleotide sequence in a cell. In some embodiments, at least one of the ribonucleic acids comprises a guide RNA that directs the Cas protein to and hybridizes to a target motif of the target polynucleotide sequence in a cell. In some embodiments, both of the one to two ribonucleic acids comprise a guide RNA that directs the Cas protein to and hybridizes to a target motif of the target polynucleotide sequence in a cell. The ribonucleic acids of the present invention can be selected to hybridize to a variety of different target motifs, depending on the particular CRISPR/Cas system employed, and the sequence of the target polynucleotide, as will be appreciated by those skilled in the art. The one to two ribonucleic acids can also be selected to minimize hybridization with nucleic acid sequences other than the target polynucleotide sequence. In some embodiments, the one to two ribonucleic acids hybridize to a target motif that contains at least two mismatches when compared with all other genomic nucleotide sequences in the cell. In some embodiments, the one to two ribonucleic acids hybridize to a target motif that contains at least one mismatch when compared with all other genomic nucleotide sequences in the cell. In some embodiments, the one to two ribonucleic acids are designed to hybridize to a target motif immediately adjacent to a deoxyribonucleic acid motif recognized by the Cas protein. In some embodiments, each of the one to two ribonucleic acids are designed to hybridize to target motifs immediately adjacent to deoxyribonucleic acid motifs recognized by the Cas protein which flank a mutant allele located between the target motifs.

[0212] In some embodiments, at least one of the one to two ribonucleic acids comprises a sequence selected from the group consisting of the ribonucleic acid sequences of SEQ ID NOs: 1-195 and 797-3637. In some embodiments, at least one of the one to two ribonucleic acids comprises a sequence selected from the group consisting of the ribonucleic acid sequences of SEQ ID NOs: 196-531 and 4047-8945. In some embodiments, at least one of the one to two ribonucleic acids comprises a sequence selected from the group consisting of the ribonucleic acid sequences of SEQ ID NOs: 532-609 and 9102-9750. In some embodiments, at least one of the one to two ribonucleic acids comprises a sequence selected from the group consisting of the ribonucleic acid sequences of SEQ ID NOs: 610-765 and 9798-10532. In some embodiments, at least one of the one to two ribonucleic acids comprises a sequence selected from the group consisting of the ribonucleic acid sequences of SEQ ID NOs: 766-780 and 10574-13257.

[0213] In some embodiments, at least one ribonucleic acid comprises a sequence selected from the group consisting of the ribonucleic acid sequences of SEQ ID NOs: 3638-4046. In some embodiments, at least one ribonucleic acid comprises a sequence selected from the group consisting of the ribonucleic acid sequences of SEQ ID NOs: 8946-9101. In some embodiments, at least one ribonucleic acid comprises a sequence selected from the group consisting of the ribonucleic acid sequences of SEQ ID NOs: 9751-9797. In some embodiments, at least one ribonucleic acid comprises a sequence selected from the group consisting of the ribonucleic acid sequences of SEQ ID NOs: 10533-10573. In some embodiments, at least one ribonucleic acid comprises a sequence selected from the group consisting of the ribonucleic acid sequences of SEQ ID NOs: 13258-13719.

[0214] In some embodiments, at least one of the one to two ribonucleic acids comprises a sequence with a single nucleotide mismatch to a sequence selected from the group consisting of the ribonucleic acid sequences of SEQ ID NOs: 1-195 and 797-3637. In some embodiments, at least one of the one to two ribonucleic acids comprises a sequence with a single nucleotide mismatch to a sequence selected from the group consisting of the ribonucleic acid sequences of SEQ ID NOs: 196-531 and 4047-8945. In some embodiments, at least one of the one to two ribonucleic acids comprises a sequence with a single nucleotide mismatch to a sequence selected from the group consisting of the ribonucleic acid sequences of SEQ ID NOs: 532-609 and 9102-9750. In some embodiments, at least one of the one to two ribonucleic acids comprises a sequence with a single nucleotide mismatch to a sequence selected from the group consisting of the ribonucleic acid sequences of SEQ ID NOs: 610-765 and 9798-10532. In some embodiments, at least one of the one to two ribonucleic acids comprises a sequence with a single nucleotide mismatch to a sequence selected from the group consisting of the ribonucleic acid sequences of SEQ ID NOs: 766-780 and 10574-13257.

[0215] In some embodiments, at least one ribonucleic acid comprises a sequence with a single nucleotide mismatch to a sequence selected from the group consisting of the ribonucleic acid sequences of SEQ ID NOs: 3638-4046. In some embodiments, at least one ribonucleic acid comprises a sequence with a single nucleotide mismatch to a sequence selected from the group consisting of the ribonucleic acid sequences of SEQ ID NOs: 8946-9101. In some embodiments, at least one ribonucleic acid comprises a sequence with a single nucleotide mismatch to a sequence selected from the group consisting of the ribonucleic acid sequences of SEQ ID NOs: 9751-9797. In some embodiments, at least one ribonucleic acid comprises a sequence with a single nucleotide mismatch to a sequence selected from the group consisting of the ribonucleic acid sequences of SEQ ID NOs: 10533-10573. In some embodiments, at least one ribonucleic acid comprises a sequence with a single nucleotide mismatch to a sequence selected from the group consisting of the ribonucleic acid sequences of SEQ ID NOs: 13258-13719.

[0216] In some embodiments, each of the one to two ribonucleic acids comprises guide RNAs that directs the Cas protein to and hybridizes to a target motif of the target polynucleotide sequence in a cell. In some embodiments, one or two ribonucleic acids (e.g., guide RNAs) are complementary to and/or hybridize to sequences on the same strand of a target polynucleotide sequence. In some embodiments, one or two ribonucleic acids (e.g., guide RNAs) are complementary to and/or hybridize to sequences on the opposite strands of a target polynucleotide sequence. In some embodiments, the one or two ribonucleic acids (e.g., guide RNAs) are not complementary to and/or do not hybridize to sequences on the opposite strands of a target polynucleotide sequence. In some embodiments, the one or two ribonucleic acids (e.g., guide RNAs) are complementary to and/or hybridize to overlapping target motifs of a target polynucleotide sequence. In some embodiments, the one or two ribonucleic acids (e.g., guide RNAs) are complementary to and/or hybridize to offset target motifs of a target polynucleotide sequence.

[0217] The present invention also contemplates multiplex genomic editing. Those skilled in the art will appreciate that the description above with respect to genomic editing of a single gene is equally applicable to the multiplex genomic editing embodiments described below.

[0218] As used herein, the terms “administering,” “introducing” and “transplanting” are used interchangeably in the context of the placement of cells, e.g. cells described herein comprising a target polynucleotide sequence altered according to the methods of the invention into a subject, by a method or route which results in at least partial localization of the introduced cells at a desired site. The cells can be implanted directly to the desired site, or alternatively be administered by any appropriate route which results in delivery to a desired location in the subject where at least a portion of the implanted cells or components of the cells remain viable. The period of viability of the cells after administration to a subject can be as short as a few hours, e.g. twenty-four hours, to a few days, to as long as several years. In some instances, the cells can also be administered a location other than the desired site, such as in the liver or subcutaneously, for example, in a capsule to maintain the implanted cells at the implant location and avoid migration of the implanted cells.

[0219] For ex vivo methods, cells can include autologous cells, i.e., a cell or cells taken from a subject who is in need of altering a target polynucleotide sequence in the cell or cells (i.e., the donor and recipient are the same individual). Autologous cells have the advantage of avoiding any immunologically-based rejection of the cells. Alternatively, the cells can be heterologous, e.g., taken from a donor. The second subject can be of the same or different species. Typically, when the cells come from a donor, they will be from a donor who is sufficiently immunologically compatible with the recipient, i.e., will not be subject to transplant rejection, to lessen or remove the need for immunosuppression. In some embodiments, the cells are taken from a xenogeneic source, i.e., a non-human mammal that has been genetically engineered to be sufficiently immunologically compatible with the recipient, or the recipient's species. Methods for determining immunological compatibility are known in the art, and include tissue typing to assess donor-recipient compatibility for HLA and ABO determinants. See, e.g., Transplantation Immunology, Bach and Auchincloss, Eds. (Wiley, John & Sons, Incorporated 1994).

[0220] Any suitable cell culture media can be used for ex vivo methods of the invention.

[0221] The terms “subject” and “individual” are used interchangeably herein, and refer to an animal, for example, a human from whom cells can be obtained and/or to whom treatment, including prophylactic treatment, with the cells as described herein, is provided. For treatment of those infections, conditions or disease states which are specific for a specific animal such as a human subject, the term subject refers to that specific animal. The “non-human animals” and “non-human mammals” as used interchangeably herein, includes mammals such as rats, mice, rabbits, sheep, cats, dogs, cows, pigs, and non-human primates. The term “subject” also encompasses any vertebrate including but not limited to mammals, reptiles, amphibians and fish. However, advantageously, the subject is a mammal such as a human, or other mammals such as a domesticated mammal, e.g. dog, cat, horse, and the like, or production mammal, e.g. cow, sheep, pig, and the like.

[0222] In some embodiments, the alteration results in reduced expression of the target polynucleotide sequences. In some embodiments, the alteration results in a knock out of the target polynucleotide sequences. In some embodiments, the alteration results in correction of the target polynucleotide sequences from undesired sequences to desired sequences. In some embodiments, each alteration is a homozygous alteration. In some embodiments, the efficiency of alteration at each loci is from about 5% to about 80%. In some embodiments, the efficiency of alteration at each loci is from about 10% to about 80%. In some embodiments, the efficiency of alteration at each loci is from about 30% to about 80%. In some embodiments, the efficiency of alteration at each loci is from about 50% to about 80%. In some embodiments, the efficiency of alteration at each loci is from greater than or equal to about 80%. In some embodiments, the efficiency of alteration at each loci is from greater than or equal to about 85%. In some embodiments, the efficiency of alteration at each loci is greater than or equal to about 90%, 91%, 92%, 93%, 94%, 95%, 96%, 97%, 98%, or 99%. In some embodiments, the efficiency of alteration at each loci is about 100%.

[0223] In some embodiments, each target polynucleotide sequence is cleaved such that a double-strand break results. In some embodiments, each target polynucleotide sequence is cleaved such that a single-strand break results.

[0224] In some embodiments, the target polynucleotide sequences comprise multiple different portions of CTLA4. In some embodiments, the target polynucleotide sequences comprise multiple different portions of PD1. In some embodiments, the target polynucleotide sequences comprise multiple different portions of TCRA. In some embodiments, the target polynucleotide sequences comprise multiple different portions of TCRB. In some embodiments, the target polynucleotide sequences comprise multiple different portions of B2M.

[0225] In some embodiments, each target motif is a 17 to 23 nucleotide DNA sequence. In some embodiments, each target motif is a 20-nucleotide DNA sequence. In some embodiments, each target motif is a 20-nucleotide DNA sequence with a 5′ T-rich region. In some embodiments, each target motif is a 20-nucleotide DNA sequence beginning with G and immediately precedes an NGG motif recognized by the Cas protein. In some embodiments, each target motif is a 20-nucleotide DNA sequence and immediately precedes an NGG motif recognized by the Cas protein. In some embodiments, each target motif is G(N)₁₉NGG. In some embodiments, each target motif is (N)₂₀NGG. In some embodiments, each target motif is selected such that it contains at least two mismatches when compared with all other genomic nucleotide sequences in the cell. In some embodiments, each target motif is selected such that it contains at least two mismatches when compared with all other genomic nucleotide sequences in the cell.

[0226] In some embodiments, each target motif is a 17 to 23-nucleotide DNA sequence and immediately precedes an NNGRRT motif. In some embodiments, each target motif is a 20 nucleotide DNA sequence and immediately precedes an NNGRRT motif. In some embodiments, each target motif is a 17 to 23-nucleotide DNA sequence and immediately precedes an NNNRRT motif. In some embodiments, each target motif is a 20 nucleotide DNA sequence and immediately precedes an NNNRRT motif. In some embodiments, each target motif is a 17 to 23-nucleotide DNA sequence and immediately precedes an NNAGAAW motif. In some embodiments, each target motif is a 20 nucleotide DNA sequence and immediately precedes an NNAGAAW motif. In some embodiments, each target motif is a 17 to 23-nucleotide DNA sequence and immediately precedes an NNNNGATT motif. In some embodiments, each target motif is a 20 nucleotide DNA sequence and immediately precedes an NNNNGATT motif. In some embodiments, each target motif is a 17 to 23-nucleotide DNA sequence and immediately precedes an NAAAAC motif. In some embodiments, each target motif is a 20 nucleotide DNA sequence and immediately precedes an NAAAAC motif. In some embodiments, each target motif is a 17 to 23-nucleotide DNA sequence having a 5′ T-rich region (e.g., TTTN motif). In some embodiments, each target motif is a 20-nucleotide DNA sequence having a 5′ T-rich region (e.g. TTTN motif).

[0227] In some embodiments, subsequent to cleavage of the target polynucleotide sequences, homology-directed repair occurs. In some embodiments, homology-directed repair is performed using an exogenously introduced DNA repair template. In some embodiments, exogenously introduced DNA repair template is single-stranded. In some embodiments, exogenously introduced DNA repair template is double-stranded.

[0228] In some embodiments, the Cas protein (e.g., Cas9 or Cpf1) is complexed with at least one ribonucleic acid. In some embodiments, the Cas protein (e.g., Cas9) is complexed with multiple ribonucleic acids. In some embodiments, the multiple ribonucleic acids are selected to minimize hybridization with nucleic acid sequences other than the target polynucleotide sequence (e.g., multiple alterations of a single target polynucleotide sequence). In some embodiments, the multiple ribonucleic acids are selected to minimize hybridization with nucleic acid sequences other than the target polynucleotide sequences (e.g., one or more alterations of multiple target polynucleotide sequences). In some embodiments, each of the multiple ribonucleic acids hybridize to target motifs that contain at least two mismatches when compared with all other genomic nucleotide sequences in the cell. In some embodiments, each of the multiple ribonucleic acids hybridize to target motifs that contain at least one mismatch when compared with all other genomic nucleotide sequences in the cell. In some embodiments, each of the multiple ribonucleic acids are designed to hybridize to target motifs immediately adjacent to deoxyribonucleic acid motifs recognized by the Cas protein. In some embodiments, each of the multiple ribonucleic acids are designed to hybridize to target motifs immediately adjacent to deoxyribonucleic acid motifs recognized by the Cas protein which flank mutant alleles located between the target motifs.

[0229] In some embodiments, the Cas protein (e.g., Cpf1) is complexed with a single ribonucleic acid. In some embodiments, the ribonucleic acid is selected to minimize hybridization with a nucleic acid sequence other than the target polynucleotide sequence (e.g., multiple alterations of a single target polynucleotide sequence). In some embodiments, the ribonucleic acid is selected to minimize hybridization with a nucleic acid sequence other than the target polynucleotide sequences (e.g., one or more alterations of multiple target polynucleotide sequences). In some embodiments, the ribonucleic acid hybridizes to target motifs that contain at least two mismatches when compared with all other genomic nucleotide sequences in the cell. In some embodiments, the ribonucleic acid hybridizes to target motifs that contain at least one mismatch when compared with all other genomic nucleotide sequences in the cell. In some embodiments, the ribonucleic acid is designed to hybridize to target motifs immediately adjacent to deoxyribonucleic acid motifs recognized by the Cas protein. In some embodiments, the ribonucleic acid is designed to hybridize to target motifs immediately adjacent to deoxyribonucleic acid motifs recognized by the Cas protein which flank mutant alleles located between the target motifs.

[0230] It should be appreciated that any of the nucleic acid encoding Cas protein or the ribonucleic acids (e.g., SEQ ID NOs: 1-780 and 797-13719) can be expressed from a plasmid. In some embodiments, any of the Cas protein or the ribonucleic acids are expressed using a promoter optimized for increased expression in stem cells (e.g., human stem and/or progenitor cells). In some embodiments, the promoter is selected from the group consisting of a Cytomegalovirus (CMV) early enhancer element and a chicken beta-actin promoter, a chicken beta-actin promoter, an elongation factor-1 alpha promoter, and a ubiquitin promoter.

[0231] In some embodiments, the methods of the present invention further comprise selecting cells that express the Cas protein. The present invention contemplates any suitable method for selecting cells. In some embodiments, selecting cells comprises FACS. In some embodiments, FACS is used to select cells which co-express Cas and a fluorescent protein selected from the group consisting of green fluorescent protein and red fluorescent protein.

[0232] Methods of Treatment

[0233] The present invention contemplates treating and/or preventing a variety of disorders which are associated with expression of a target polynucleotide sequences.

[0234] The present invention also contemplates various methods of treatment using the modified primary human cells of the present invention, compositions comprising those cells, and compositions of the present invention (e.g., a chimeric nucleic acid). The terms “treat”, “treating”, “treatment”, etc., as applied to an isolated cell, include subjecting the cell to any kind of process or condition or performing any kind of manipulation or procedure on the cell. As applied to a subject, the terms refer to administering a cell or population of cells in which a target polynucleotide sequence (e.g., CTLA4, PD1, TCRA, TCRB, B2M, etc.) has been altered ex vivo according to the methods described herein to an individual. The individual is usually ill or injured, or at increased risk of becoming ill relative to an average member of the population and in need of such attention, care, or management.

[0235] As used herein, the term “treating” and “treatment” refers to administering to a subject an effective amount of cells with target polynucleotide sequences altered ex vivo according to the methods described herein so that the subject has a reduction in at least one symptom of the disease or an improvement in the disease, for example, beneficial or desired clinical results. For purposes of this invention, beneficial or desired clinical results include, but are not limited to, alleviation of one or more symptoms, diminishment of extent of disease, stabilized (i.e., not worsening) state of disease, delay or slowing of disease progression, amelioration or palliation of the disease state, and remission (whether partial or total), whether detectable or undetectable. Treating can refer to prolonging survival as compared to expected survival if not receiving treatment. Thus, one of skill in the art realizes that a treatment may improve the disease condition, but may not be a complete cure for the disease. As used herein, the term “treatment” includes prophylaxis. Alternatively, treatment is “effective” if the progression of a disease is reduced or halted. “Treatment” can also mean prolonging survival as compared to expected survival if not receiving treatment. Those in need of treatment include those already diagnosed with a disorder associated with expression of a polynucleotide sequence, as well as those likely to develop such a disorder due to genetic susceptibility or other factors.

[0236] By “treatment,” “prevention” or “amelioration” of a disease or disorder is meant delaying or preventing the onset of such a disease or disorder, reversing, alleviating, ameliorating, inhibiting, slowing down or stopping the progression, aggravation or deterioration the progression or severity of a condition associated with such a disease or disorder. In one embodiment, the symptoms of a disease or disorder are alleviated by at least 5%, at least 10%, at least 20%, at least 30%, at least 40%, or at least 50%.

[0237] It should be appreciated that the methods and compositions described herein can be used to treat or prevent disorders associated with increased expression of a target polynucleotide sequence, as well as decreased expression of a target polynucleotide sequence in a cell. Increased and decreased expression of a target polynucleotide sequence includes circumstances where the expression levels of the target polynucleotide sequence are increased or decreased, respectively, as well as circumstances in which the function and/or level of activity of an expression product of the target polynucleotide sequence increases or decreases, respectively, compared to normal expression and/or activity levels. Those skilled in the art will appreciate that treating or preventing a disorder associated with increased expression of a target polynucleotide sequence can be assessed by determining whether the levels and/or activity of the target polynucleotide sequence (or an expression product thereof) are decreased in a relevant cell after contacting a cell with a composition described herein. The skilled artisan will also appreciate that treating or preventing a disorder associated with decreased expression of a target polynucleotide sequence can be assessed by determining whether the levels and/or activity of the target polynucleotide sequence (or an expression product thereof) are increased in the relevant cell after contacting a cell with a composition described herein.

[0238] In some embodiments, the disorder is cancer. The term “cancer” as used herein is defined as a hyperproliferation of cells whose unique trait—loss of normal controls—results in unregulated growth, lack of differentiation, local tissue invasion, and metastasis. With respect to the inventive methods, the cancer can be any cancer, including any of acute lymphocytic cancer, acute myeloid leukemia, alveolar rhabdomyosarcoma, bladder cancer, bone cancer, brain cancer, breast cancer, cancer of the anus, anal canal, or anorectum, cancer of the eye, cancer of the intrahepatic bile duct, cancer of the joints, cancer of the neck, gallbladder, or pleura, cancer of the nose, nasal cavity, or middle ear, cancer of the oral cavity, cancer of the vulva, chronic lymphocytic leukemia, chronic myeloid cancer, colon cancer, esophageal cancer, cervical cancer, fibrosarcoma, gastrointestinal carcinoid tumor, Hodgkin lymphoma, hypopharynx cancer, kidney cancer, larynx cancer, leukemia, liquid tumors, liver cancer, lung cancer, lymphoma, malignant mesothelioma, mastocytoma, melanoma, multiple myeloma, nasopharynx cancer, non-Hodgkin lymphoma, ovarian cancer, pancreatic cancer, peritoneum, omentum, and mesentery cancer, pharynx cancer, prostate cancer, rectal cancer, renal cancer, skin cancer, small intestine cancer, soft tissue cancer, solid tumors, stomach cancer, testicular cancer, thyroid cancer, ureter cancer, and urinary bladder cancer. As used herein, the term “tumor” refers to an abnormal growth of cells or tissues of the malignant type, unless otherwise specifically indicated and does not include a benign type tissue.

[0239] In some embodiments, the disorder is a genetic disorder. In some embodiments, the disorder is a monogenic disorder. In some embodiments, the disorder is a multigenic disorder. In some embodiments, the disorder is a disorder associated with one or more SNPs. Exemplary disorders associated with one or more SNPs include a complex disease described in U.S. Pat. No. 7,627,436, Alzheimer's disease as described in PCT International Application Publication No. WO/2009/112882, inflammatory diseases as described in U.S. Patent Application Publication No. 2011/0039918, polycystic ovary syndrome as described in U.S. Patent Application Publication No. 2012/0309642, cardiovascular disease as described in U.S. Pat. No. 7,732,139, Huntington's disease as described in U.S. Patent Application Publication No. 2012/0136039, thromboembolic disease as described in European Patent Application Publication No. EP2535424, neurovascular diseases as described in PCT International Application Publication No. WO/2012/001613, psychosis as described in U.S. Patent Application Publication No. 2010/0292211, multiple sclerosis as described in U.S. Patent Application Publication No. 2011/0319288, schizophrenia, schizoaffective disorder, and bipolar disorder as described in PCT International Application Publication No. WO/2006/023719A2, bipolar disorder and other ailments as described in U.S. Patent Application Publication No. U.S. 2011/0104674, colorectal cancer as described in PCT International Application Publication No. WO/2006/104370A1, a disorder associated with a SNP adjacent to the AKT1 gene locus as described in U.S. Patent Application Publication No. U.S. 2006/0204969, an eating disorder as described in PCT International Application Publication No. WO/2003/012143A1, autoimmune disease as described in U.S. Patent Application Publication No. U.S. 2007/0269827, fibrostenosing disease in patients with Crohn's disease as described in U.S. Pat. No. 7,790,370, and Parkinson's disease as described in U.S. Pat. No. 8,187,811, each of which is incorporated herein by reference in its entirety. Other disorders associated with one or more SNPs which can be treated or prevented according to the methods of the present invention will be apparent to the skilled artisan.

[0240] In some embodiments, the disorder is a chronic infectious disease. A “chronic infectious disease” is a disease caused by an infectious agent wherein the infection has persisted. Such a disease may include hepatitis (A, B, or C), herpes virus (e.g., VZV, HSV-1, HSV-6, HSV-II, CMV, and EBV), and HIV/AIDS. Non-viral examples may include chronic fungal diseases such Aspergillosis, Candidiasis, Coccidioidomycosis, and diseases associated with Cryptococcus and Histoplasmosis. None limiting examples of chronic bacterial infectious agents may be Chlamydia pneumoniae, Listeria monocytogenes, and Mycobacterium tuberculosis. In some embodiments, the disorder is human immunodeficiency virus (HIV) infection. In some embodiments, the disorder is acquired immunodeficiency syndrome (AIDS).

[0241] In some embodiments, the disorder is an autoimmune disorder. The term “autoimmune disease” refers to any disease or disorder in which the subject mounts a destructive immune response against its own tissues. Autoimmune disorders can affect almost every organ system in the subject (e.g., human), including, but not limited to, diseases of the nervous, gastrointestinal, and endocrine systems, as well as skin and other connective tissues, eyes, blood and blood vessels. Examples of autoimmune diseases include, but are not limited to Hashimoto's thyroiditis, Systemic lupus erythematosus, Sjogren's syndrome, Graves' disease, Scleroderma, Rheumatoid arthritis, Multiple sclerosis, Myasthenia gravis and Diabetes.

[0242] In some embodiments, the disorder is graft versus host disease (GVHD).

[0243] The methods of the present invention are capable of altering target polynucleotide sequences in a variety of different cells (e.g., altering an immunological checkpoint regulator gene, e.g., CTL4, PD1, etc. to reduce or eliminate T cell inhibition, altering the genes encoding the TCR alpha and beta chains to reduce or eliminate T cell autoreactivity, and/or altering B2M to ablate MHC class I surface expression, and optionally altering one or more additional target polynucleotide sequences associated with a disorder in which altering the target polynucleotide sequences would be beneficial, and/or optionally causing the cell to express a protein that modulates at least one biological process). In some embodiments, the methods of the present invention are used to alter target polynucleotide sequences in cells ex vivo for subsequent introduction into a subject.

[0244] In some embodiments, the cell or population thereof is a primary cell. In some embodiments, the cell or population thereof is a primary T cell (e.g., human). The T cell can be any T cell, including without limitation, cytotoxic T-cells (e.g., CD8+ cells), helper T-cells (e.g., CD4+ cells), memory T-cells, regulatory T-cells, tissue infiltrating lymphocytes (e.g., tumor infiltrating lymphocytes, e.g., TILs, CD3+ cells), and combinations thereof.

[0245] In some embodiments, the cell is a peripheral blood cell. In some embodiments, the cell is a stem cell or a pluripotent cell. In some embodiments, the cell is a hematopoietic stem cell. In some embodiments, the cell is a CD34+ cell. In some embodiments, the cell is a CD34+ mobilized peripheral blood cell. In some embodiments, the cell is a CD34+ cord blood cell. In some embodiments, the cell is a CD34+ bone marrow cell. In some embodiments, the cell is a CD34+CD38-Lineage-CD90+CD45RA-cell. In some embodiments, the cell is a CD4+ cell. In some embodiments, the cell is a CD4+ T cell. In some embodiments, the cell is a hepatocyte. In some embodiments, the cell is a human pluripotent cell. In some embodiments, the cell is a primary human cell. In some embodiments, the cell is a primary CD34+ cell. In some embodiments, the cell is a primary CD34+ hematopoietic progenitor cell (HPC). In some embodiments, the cell is a primary CD4+ cell. In some embodiments, the cell is a primary CD4+ T cell. In some embodiments, the cell is an autologous primary cell. In some embodiments, the cell is an autologous primary somatic cell. In some embodiments, the cell is an allogeneic primary cell. In some embodiments, the cell is an allogeneic primary somatic cell. In some embodiments, the cell is a nucleated cell. In some embodiments, the cell is a non-transformed cell. In some embodiments, the cell is a human choriocarcinoma cell. In some embodiments, the cell is a JEG-3 cell. In some embodiments, the cell is a monocyte cell. In some embodiments, the cell is a Thp-1 cell. In some embodiments, the cell is not a cancer cell. In some embodiments, the cell is not a tumor cell. In some embodiments, the cell is not a transformed cell.

[0246] The cell or population thereof can be obtained from any subject, e.g., a subject suffering from, being treated for, diagnosed with, at risk of developing, or suspected of having, a disorder selected from the group consisting of an autoimmune disorder, cancer, a chronic infectious disease, and graft versus host disease (GVHD).

[0247] The present invention also provides compositions comprising Cas proteins of the present invention or functional portions thereof, nucleic acids encoding the Cas proteins or functional portions thereof, and ribonucleic acid sequences which direct Cas proteins to and hybridize to target motifs of target polynucleotides in a cell.

[0248] In some aspects, disclosed, herein are compositions comprising a nucleic acid sequence encoding a Cas 9 protein, and at least one ribonucleic acid sequence selected from the group consisting of SEQ ID NOs: 1-195 and 797-3637. In some aspects, disclosed herein are compositions comprising a nucleic acid sequence encoding a Cas 9 protein, a pair of ribonucleic acid sequences selected from the group consisting of SEQ ID NOs: 1-195 and 797-3637. In some embodiments, the first ribonucleic acid comprises a sequence with a single nucleotide mismatch to a sequence selected from the group consisting of SEQ ID NOs: 1-195 and 797-3637. In some embodiments, the first ribonucleic acid comprises a sequence with a two nucleotide mismatch to a sequence selected from the group consisting of SEQ ID NOs: 1-195 and 797-3637. In some embodiments, the second ribonucleic acid comprises a sequence with a single nucleotide mismatch to a sequence selected from the group consisting of SEQ ID NOs: 1-195 and 797-3637. In some embodiments, the second ribonucleic acid comprises a sequence with a two nucleotide mismatch to a sequence selected from the group consisting of SEQ ID NOs: 1-195 and 797-3637. In some embodiments, the pair of ribonucleic acids comprise sequences with at least one nucleotide mismatch or at least two nucleotide mismatches to a sequence selected from the group consisting of SEQ ID NOs: 1-195 and 797-3637.

[0249] In some embodiments, the pair of ribonucleic acid sequences comprises or consists of SEQ ID NO: 128 and SEQ ID NO: 72. In some embodiments, the pair of ribonucleic acids comprise sequences with at least one nucleotide mismatch or at least two nucleotide mismatches to SEQ ID NO: 128 and 72.

[0250] In some aspects, disclosed herein are compositions comprising a nucleic acid sequence encoding a Cas 9 protein, and at least one ribonucleic acid sequence selected from the group consisting of SEQ ID NOs: 196-531 and 4047-8945. In some aspects, disclosed herein are compositions comprising a nucleic acid sequence encoding a Cas 9 protein, a pair of ribonucleic acid sequences selected from the group consisting of SEQ ID NOs: 196-531 and 4047-8945. In some embodiments, the first ribonucleic acid comprises a sequence with a single nucleotide mismatch to a sequence selected from the group consisting of SEQ ID NOs: 196-531 and 4047-8945. In some embodiments, the first ribonucleic acid comprises a sequence with a two nucleotide mismatch to a sequence selected from the group consisting of SEQ ID NOs: 196-531 and 4047-8945. In some embodiments, the second ribonucleic acid comprises a sequence with a single nucleotide mismatch to a sequence selected from the group consisting of SEQ ID NOs: 196-531 and 4047-8945. In some embodiments, the second ribonucleic acid comprises a sequence with a two nucleotide mismatch to a sequence selected from the group consisting of SEQ ID NOs: 196-531 and 4047-8945. In some embodiments, the pair of ribonucleic acids comprise sequences with at least one nucleotide mismatch or at least two nucleotide mismatches to a sequence selected from the group consisting of SEQ ID NOs: 196-531 and 4047-8945.

[0251] In some embodiments, the pair of ribonucleic acid sequences comprises or consists of SEQ ID NO: 462 and SEQ ID NO: 421. In some embodiments, the pair of ribonucleic acids comprise sequences with at least one nucleotide mismatch or at least two nucleotide mismatches to SEQ ID NO: 462 and SEQ ID NO: 421.

[0252] In some aspects, disclosed herein are compositions comprising a nucleic acid sequence encoding a Cas 9 protein, and at least one ribonucleic acid sequence selected from the group consisting of SEQ ID NOs: 532-609 and 9102-9750. In some aspects, disclosed herein are compositions comprising a nucleic acid sequence encoding a Cas 9 protein, a pair of ribonucleic acid sequences selected from the group consisting of SEQ ID NOs: 532-609 and 9102-9750. In some embodiments, the first ribonucleic acid comprises a sequence with a single nucleotide mismatch to a sequence selected from the group consisting of SEQ ID NOs: 532-609 and 9102-9750. In some embodiments, the first ribonucleic acid comprises a sequence with a two nucleotide mismatch to a sequence selected from the group consisting of SEQ ID 532-609 and 9102-9750. In some embodiments, the second ribonucleic acid comprises a sequence with a single nucleotide mismatch to a sequence selected from the group consisting of SEQ ID NOs: 532-609 and 9102-9750. In some embodiments, the second ribonucleic acid comprises a sequence with a two nucleotide mismatch to a sequence selected from the group consisting of SEQ ID NOs: 532-609 and 9102-9750. In some embodiments, the pair of ribonucleic acids comprise sequences with at least one nucleotide mismatch or at least two nucleotide mismatches to a sequence selected from the group consisting of SEQ ID NOs: 532-609 and 9102-9750.

[0253] In some embodiments, the pair of ribonucleic acid sequences comprises or consists of SEQ ID NO: 550 and SEQ ID NO: 573. In some embodiments, the pair of ribonucleic acids comprise sequences with at least one nucleotide mismatch or at least two nucleotide mismatches to SEQ ID NO: 550 and SEQ ID NO: 573.

[0254] In some aspects, disclosed herein are compositions comprising a nucleic acid sequence encoding a Cas 9 protein, and at least one ribonucleic acid sequence selected from the group consisting of SEQ ID NOs: 610-765 and 9798-10532. In some aspects, disclosed herein are compositions comprising a nucleic acid sequence encoding a Cas 9 protein, a pair of ribonucleic acid sequences selected from the group consisting of SEQ ID NOs: 610-765 and 9798-10532. In some embodiments, the first ribonucleic acid comprises a sequence with a single nucleotide mismatch to a sequence selected from the group consisting of SEQ ID NOs: 610-765 and 9798-10532. In some embodiments, the first ribonucleic acid comprises a sequence with a two nucleotide mismatch to a sequence selected from the group consisting of SEQ ID NOs: 610-765 and 9798-10532. In some embodiments, the second ribonucleic acid comprises a sequence with a single nucleotide mismatch to a sequence selected from the group consisting of SEQ ID NOs: 610-765 and 9798-10532. In some embodiments, the second ribonucleic acid comprises a sequence with a two nucleotide mismatch to a sequence selected from the group consisting of SEQ ID NOs: 610-765 and 9798-10532. In some embodiments, the pair of ribonucleic acids comprise sequences with at least one nucleotide mismatch or at least two nucleotide mismatches to a sequence selected from the group consisting of SEQ ID NOs: 610-765 and 9798-10532.

[0255] In some embodiments, the pair of ribonucleic acid sequences comprises or consists of SEQ ID NO: 657 and SEQ ID NO: 662. In some embodiments, the pair of ribonucleic acids comprise sequences with at least one nucleotide mismatch or at least two nucleotide mismatches to SEQ ID NO: 550 and SEQ ID NO: 573.

[0256] In some aspects, disclosed herein are compositions comprising a nucleic acid sequence encoding a Cas 9 protein, and at least one ribonucleic acid sequence selected from the group consisting of SEQ ID NOs: 766-780 and 10574-13257. In some aspects, disclosed herein are compositions comprising a nucleic acid sequence encoding a Cas 9 protein, a pair of ribonucleic acid sequences selected from the group consisting of SEQ ID NOs: 766-780 and 10574-13257. In some embodiments, the first ribonucleic acid comprises a sequence with a single nucleotide mismatch to a sequence selected from the group consisting of SEQ ID NOs: 766-780 and 10574-13257. In some embodiments, the first ribonucleic acid comprises a sequence with a two nucleotide mismatch to a sequence selected from the group consisting of SEQ ID NOs: 766-780 and 10574-13257. In some embodiments, the second ribonucleic acid comprises a sequence with a single nucleotide mismatch to a sequence selected from the group consisting of SEQ ID NOs: 766-780 and 10574-13257. In some embodiments, the second ribonucleic acid comprises a sequence with a two nucleotide mismatch to a sequence selected from the group consisting of SEQ ID NOs: 766-780 and 10574-13257. In some embodiments, the pair of ribonucleic acids comprise sequences with at least one nucleotide mismatch or at least two nucleotide mismatches to a sequence selected from the group consisting of SEQ ID NOs: 766-780 and 10574-13257.

[0257] In some embodiments, the pair of ribonucleic acid sequences comprises or consists of SEQ ID NO: 773 and SEQ ID NO: 778. In some embodiments, the pair of ribonucleic acids comprise sequences with at least one nucleotide mismatch or at least two nucleotide mismatches to SEQ ID NO: 773 and SEQ ID NO: 778.

[0258] In some aspects, disclosed herein are compositions comprising a nucleic acid sequence encoding a Cpf1 protein, and a ribonucleic acid having a sequence selected from the group consisting of SEQ ID NOs: 3638-4046. In some embodiments, the ribonucleic acid comprises a sequence with a single nucleotide mismatch to a sequence selected from the group consisting of SEQ ID NOs: 3638-4046. In some embodiments, the ribonucleic acid comprises a sequence with a two nucleotide mismatch to a sequence selected from the group consisting of SEQ ID NOs: 3638-4046.

[0259] In some aspects, disclosed herein are compositions comprising a nucleic acid sequence encoding a Cpf1 protein, and a ribonucleic acid having a sequence selected from the group consisting of SEQ ID NOs: 8946-9101. In some embodiments, the ribonucleic acid comprises a sequence with a single nucleotide mismatch to a sequence selected from the group consisting of SEQ ID NOs: 8946-9101. In some embodiments, the ribonucleic acid comprises a sequence with a two nucleotide mismatch to a sequence selected from the group consisting of SEQ ID NOs: 8946-9101.

[0260] In some aspects, disclosed herein are compositions comprising a nucleic acid sequence encoding a Cpf1 protein, and a ribonucleic acid having a sequence selected from the group consisting of SEQ ID NOs: 9751-9797. In some embodiments, the ribonucleic acid comprises a sequence with a single nucleotide mismatch to a sequence selected from the group consisting of SEQ ID NOs: 9751-9797. In some embodiments, the ribonucleic acid comprises a sequence with a two nucleotide mismatch to a sequence selected from the group consisting of SEQ ID 9751-9797.

[0261] In some aspects, disclosed herein are compositions comprising a nucleic acid sequence encoding a Cpf1 protein, and a ribonucleic acid having a sequence selected from the group consisting of SEQ ID NOs: 10533-10573, In some embodiments, the ribonucleic acid comprises a sequence with a single nucleotide mismatch to a sequence selected from the group consisting of SEQ ID NOs: 10533-10573. In some embodiments, the ribonucleic acid comprises a sequence with a two nucleotide mismatch to a sequence selected from the group consisting of SEQ ID NOs: 10533-10573.

[0262] In some aspects, disclosed herein are compositions comprising a nucleic acid sequence encoding a Cpf1 protein, and a ribonucleic acid having a sequence selected from the group consisting of SEQ ID NOs: 13258-13719. In some embodiments, the ribonucleic acid comprises a sequence with a single nucleotide mismatch to a sequence selected from the group consisting of SEQ ID NOs: 13258-13719. In some embodiments, the ribonucleic acid comprises a sequence with a two nucleotide mismatch to a sequence selected from the group consisting of SEQ ID NOs: 13258-13719.

[0263] In some aspects, the invention provides a composition comprising a chimeric nucleic acid, the chimeric nucleic acid comprising: (a) a nucleic acid sequence encoding a Cas protein; and (b) at least one ribonucleic acid sequence selected from the group consisting of: (i) SEQ ID NOs: 1-195 and 797-3637; (ii) SEQ ID NOs: 196-531 and 4047-8945; (iii) SEQ ID NOs: 532-609 and 9102-9750; (iv) SEQ ID NOs: 610-765 and 9798-10532; and (v) SEQ ID NOs: 766-780 and 10574-13257; and combinations of (i)-(v).

[0264] In some embodiments, the at least one ribonucleic acid sequences in (b) is selected from the group consisting of: (i) SEQ ID NO: 128 and SEQ ID NO: 72; (ii) SEQ ID NO: 462 and SEQ ID NO: 421; (iii) SEQ ID NO: 550 and SEQ ID NO: 573; (iv) SEQ ID NO: 657 and SEQ ID NO: 662; and (v) SEQ ID NO: 773 and SEQ ID NO: 778; and combinations of (i)-(v).

[0265] In some aspects, the invention provides a composition comprising a chimeric nucleic acid, the chimeric nucleic acid comprising: (a) a nucleic acid sequence encoding a Cas protein; and (b) a ribonucleic acid sequence selected from the group consisting of: (i) SEQ ID NOs: 3638-4046; (ii) SEQ ID NOs: 8946-9101; (iii) SEQ ID NOs: 9751-9797; (iv) SEQ ID NOs: 10533-10573; and (v) SEQ ID NOs: 13258-13719; and combinations of (i)-(v).

[0266] In some embodiments, the composition further comprises a nucleic acid sequence encoding a detectable marker.

[0267] In some embodiments, the composition includes at least one additional ribonucleic acid sequences for altering a target polynucleotide sequence. In some embodiments, the composition includes at least two additional ribonucleic acid sequences for altering a target polynucleotide sequence. In some embodiments, the composition includes at least three additional ribonucleic acid sequences for altering a target polynucleotide sequence. In some embodiments, the composition includes at least four additional ribonucleic acid sequences for altering a target polynucleotide sequence.

[0268] In some embodiments, at least one of the ribonucleic acids in the composition is a modified ribonucleic acid as described herein (e.g., a synthetic, modified ribonucleic acid, e.g., comprising one to two modified nucleotides selected from the group consisting of pseudouridine, 5-methylcytodine, 2-thio-uridine, 5-methyluridine-5′-triphosphate, 4-thiouridine-5′-triphosphate, 5,6-dihydrouridine-5′-triphosphate, and 5-azauridine-5′-triphosphate, or any other modified nucleotides or modifications described herein).

[0269] In some embodiments, a composition of the present invention comprises a nucleic acid sequence encoding a Cas protein. In some embodiments, a composition of the present invention comprises nucleic acid sequence encoding Cas9 protein or a functional portion thereof. In some embodiments, a composition of the present invention comprises nucleic acid sequence encoding Cpf1 protein or a functional portion thereof.

[0270] In some embodiments, at least one of the ribonucleic acids in the composition is a modified ribonucleic acid as described herein (e.g., a synthetic, modified ribonucleic acid, e.g., comprising one to two modified nucleotides selected from the group consisting of pseudouridine, 5-methylcytodine, 2-thio-uridine, 5-methyluridine-5′-triphosphate, 4-thiouridine-5′-triphosphate, 5,6-dihydrouridine-5′-triphosphate, and 5-azauridine-5′-triphosphate, or any other modified nucleotides or modifications described herein). In some embodiments, a pair of ribonucleic acids in the composition is a modified ribonucleic acid as described herein (e.g., a synthetic, modified ribonucleic acid, e.g., comprising one to two modified nucleotides selected from the group consisting of pseudouridine, 5-methylcytodine, 2-thio-uridine, 5-methyluridine-5′-triphosphate, 4-thiouridine-5′-triphosphate, 5,6-dihydrouridine-5′-triphosphate, and 5-azauridine-5′-triphosphate, or any other modified nucleotides or modifications described herein).

[0271] In some embodiments, a composition of the present invention comprises a nucleic acid sequence encoding a Cas protein. In some embodiments, a composition of the present invention comprises nucleic acid sequence encoding Cas9 protein or a functional portion thereof. In some embodiments, a composition of the present invention comprises a nucleic acid sequence encoding a Cas protein. In some embodiments, a composition of the present invention comprises nucleic acid sequence encoding Cas9 protein or a functional portion thereof. In some embodiments, a composition of the present invention comprises nucleic acid sequence encoding Cpf1 protein or a functional portion thereof.

[0272] In some embodiments, the nucleic acid encoding the Cas protein (e.g., Cas9 or Cpf1) comprises a modified ribonucleic acid as described herein (e.g., a synthetic, modified mRNA described herein, e.g., comprising at least one modified nucleotide selected from the group consisting of pseudouridine, 5-methylcytodine, 2-thio-uridine, 5-methyluridine-5′-triphosphate, 4-thiouridine-5′-triphosphate, 5,6-dihydrouridine-5′-triphosphate, and 5-azauridine-5′-triphosphate or any other modified nucleotides or modifications described herein).

[0273] In some embodiments, a composition of the present invention comprises a nucleic acid sequence encoding a fluorescent protein selected from the group consisting of green fluorescent protein and red fluorescent protein. In some embodiments, a composition of the present invention comprises a promoter operably linked to the chimeric nucleic acid. In some embodiments, the promoter is optimized for increased expression in human cells. In some embodiments, the promoter is optimized for increased expression in human stem cells. In some embodiments, the promoter is optimized for increased expression in primary human cells. In some embodiments, the promoter is selected from the group consisting of a Cytomegalovirus (CMV) early enhancer element and a chicken beta-actin promoter, a chicken beta-actin promoter, an elongation factor-1 alpha promoter, and a ubiquitin promoter. In some embodiments, the Cas protein comprises a Cas9 protein or a functional portion thereof. In some embodiments, the Cas protein comprises a Cpf1 protein or a functional portion thereof.

[0274] The present invention also provides kits for practicing any of the methods of the present invention, as well as kits comprising the compositions of the present invention, and instructions for using the kits for altering target polynucleotide sequences in a cell or population thereof.

[0275] Administering Cells

[0276] In some aspects, the invention provides a method of administering cells to a subject in need of such cells, the method comprising: (a) contacting a cell or population of cells ex vivo with a Cas protein or a nucleic acid encoding the Cas protein and at least one ribonucleic acid which directs Cas protein to and hybridize to at least one target polynucleotide sequence selected from the group consisting of target polynucleotide sequences encoding CTLA4, PD1, TCRA, TCRB, B2M, and combinations thereof in the cell or population thereof, wherein the at least one target polynucleotide sequence is cleaved; and (b) administering the resulting cells from (a) to a subject in need of such cells.

[0277] In some aspects, the invention provides a method of administering cells to a subject in need of such cells, the method comprising: (a) contacting a cell or population of cells ex vivo with (i) a Cas protein or a nucleic acid encoding the Cas protein, and (ii) at least one pair of ribonucleic acids which direct Cas protein to and hybridize to at least one target polynucleotide sequence selected from the group consisting of target polynucleotide sequences encoding CTLA4, PD1, TCRA, TCRB, B2M, and combinations thereof in the cell or population of cells, wherein the target polynucleotide sequences are cleaved; and (b) administering the resulting cell or cells from (a) to a subject in need of such cells.

[0278] In some aspects, the invention provides a method of administering cells to a subject in need of such cells, the method comprising: (a) contacting a cell or population of cells ex vivo with (i) a Cas protein or a nucleic acid encoding the Cas protein, and (ii) one ribonucleic acid which directs Cas protein to and hybridizes to a target polynucleotide sequence selected from the group consisting of target polynucleotide sequences encoding CTLA4, PD1, TCRA, TCRB, B2M, and combinations thereof in the cell or population of cells, wherein the target polynucleotide sequences are cleaved; and (b) administering the resulting cell or cells from (a) to a subject in need of such cells.

[0279] It is contemplated that the methods of administering cells can be adapted for any purpose in which administering such cells is desirable (e.g., for allogeneic administration of cells to a subject in need of such cells). In some embodiments, the subject in need of administration of cells is suffering from a disorder. For example, the subject may be suffering from a disorder in which the particular cells are decreased in function or number, and it may be desirable to administer functional cells obtained from a healthy or normal individual in which the particular cells are functioning properly and to administer an adequate number of those healthy cells to the individual to restore the function provided by those cells (e.g., hormone producing cells which have decreased in cell number or function, immune cells which have decreased in cell number or function, etc.). In such instances, the healthy cells can be engineered to decrease the likelihood of host rejection of the healthy cells. In some embodiments, the disorder comprises a genetic disorder. In some embodiments, the disorder comprises an infection. In some embodiments, the disorder comprises HIV or AIDs. In some embodiments, the disorder comprises cancer. In some embodiments, the disorder comprises an autoimmune disease.

[0280] The population of cells can be sorted (e.g., using FACS) prior to administering the cells to select for cells in which their genome has been edited. The sorted cells can then be expanded to an amount of cells needed for transplantation for the particular disorder for which the second subject is in need of such cells. In some embodiments, the method can include, prior to the step of administering, contacting the genomically modified cells with Cas protein and one or more guide RNA sequences targeting one or more additional target polynucleotides that are associated with the disorder for which the second subject (i.e., recipient) is in need of such cells. For example with HIV, the genomically modified cells can be contacted with Cas protein and one or more guide RNA sequences targeting the CCR5 and/or CXCR4 genes, thereby editing the genome of the genomically modified cells to eliminate or reduce surface expression of CCR5 and/or CXCR4. Such cells would be beneficial for administration to a second subject (e.g., suffering from HIV or AIDS) as they would eliminate or reduce the likelihood of an unwanted host immune response due to lack of MHC class I molecule surface expression, and exhibit little or no susceptibility to HIV infection due to the lack of CCR5 and/or CXCR4 surface expression.

[0281] As used herein “nucleic acid,” in its broadest sense, includes any compound and/or substance that comprise a polymer of nucleotides linked via a phosphodiester bond. Exemplary nucleic acids include ribonucleic acids (RNAs), deoxyribonucleic acids (DNAs), threose nucleic acids (TNAs), glycol nucleic acids (GNAs), peptide nucleic acids (PNAs), locked nucleic acids (LNAs) or hybrids thereof. They may also include RNAi-inducing agents, RNAi agents, siRNAs, shRNAs, miRNAs, antisense RNAs, ribozymes, catalytic DNA, tRNA, RNAs that induce triple helix formation, aptamers, vectors, etc. In some embodiments, the nucleic acid encoding the Cas protein is an mRNA, In some embodiments, the Cas protein is encoded by a modified nucleic acid (e.g., a synthetic, modified mRNA described herein).

[0282] The present invention contemplates the use of any nucleic acid modification available to the skilled artisan. The nucleic acids of the present invention can include any number of modifications. In some embodiments, the nucleic acid comprises one or more modifications selected from the group consisting of pyridin-4-one ribonucleoside, 5-aza-uridine, 2-thio-5-aza-uridine, 2-thiouridine, 4-thio-pseudouridine, 2-thio-pseudouridine, 5-hydroxyuridine, 3-methyluridine, 5-carboxymethyl-uridine, 1-carboxymethyl-pseudouridine, 5-propynyl-uridine, 1-propynyl-pseudouridine, 5-taurinomethyluridine, 1-taurinomethyl-pseudouridine, 5-taurinomethyl-2-thio-uridine, 1-taurinomethyl-4-thio-uridine, 5-methyl-uridine, 1-methyl-pseudouridine, 4-thio-1-methyl-pseudouridine, 2-thio-1-methyl-pseudouridine, 1-methyl-1-deaza-pseudouridine, 2-thio-1-methyl-1-deaza-pseudouridine, dihydrouridine, dihydropseudouridine, 2-thio-dihydrouridine, 2-thio-dihydropseudouridine, 2-methoxyuridine, 2-methoxy-4-thio-uridine, 4-methoxy-pseudouridine, 4-methoxy-2-thio-pseudouridine, 5-aza-cytidine, pseudoisocytidine, 3-methyl-cytidine, N4-acetylcytidine, 5-formylcytidine, N4-methylcytidine, 5-hydroxymethylcytidine, 1-methyl-pseudoisocytidine, pyrrolo-cytidine, pyrrolo-pseudoisocytidine, 2-thio-cytidine, 2-thio-5-methyl-cytidine, 4-thio-pseudoisocytidine, 4-thio-1-methyl-pseudoisocytidine, 4-thio-1-methyl-1-deaza-pseudoisocytidine, 1-methyl-1-deaza-pseudoisocytidine, zebularine, 5-aza-zebularine, 5-methyl-zebularine, 5-aza-2-thio-zebularine, 2-thio-zebularine, 2-methoxy-cytidine, 2-methoxy-5-methyl-cytidine, 4-methoxy-pseudoisocytidine, 4-methoxy-1-methyl-pseudoisocytidine, 2-aminopurine, 2,6-diaminopurine, 7-deaza-adenine, 7-deaza-8-aza-adenine, 7-deaza-2-aminopurine, 7-deaza-8-aza-2-aminopurine, 7-deaza-2,6-diaminopurine, 7-deaza-8-aza-2,6-diaminopurine, 1-methyladenosine, N6-methyladenosine, N6-isopentenyladenosine, N6-(cis-hydroxyisopentenyl)adenosine, 2-methylthio-N6-(cis-hydroxyisopentenyl)adenosine, N6-glycinylcarbamoyladenosine, N6-threonylcarbamoyladenosine, 2-methylthio-N6-threonyl carbamoyladenosine, N6,N6-dimethyladenosine, 7-methyladenine, 2-methylthio-adenine, and 2-methoxy-adenine, inosine, 1-methyl-inosine, wyosine, wybutosine, 7-deaza-guanosine, 7-deaza-8-aza-guanosine, 6-thio-guanosine, 6-thio-7-deaza-guanosine, 6-thio-7-deaza-8-aza-guanosine, 7-methyl-guanosine, 6-thio-7-methyl-guanosine, 7-methylinosine, 6-methoxy-guanosine, 1-methylguanosine, N2-methylguanosine, N2,N2-dimethylguanosine, 8-oxo-guanosine, 7-methyl-8-oxo-guanosine, 1-methyl-6-thio-guanosine, N2-methyl-6-thio-guanosine, and N2,N2-dimethyl-6-thio-guanosine, and combinations thereof.

[0283] Preparation of modified nucleosides and nucleotides used in the manufacture or synthesis of modified RNAs of the present invention can involve the protection and deprotection of various chemical groups. The need for protection and deprotection, and the selection of appropriate protecting groups can be readily determined by one skilled in the art.

[0284] The chemistry of protecting groups can be found, for example, in Greene, et al., Protective Groups in Organic Synthesis, 2d. Ed., Wiley & Sons, 1991, which is incorporated herein by reference in its entirety.

[0285] Modified nucleosides and nucleotides can be prepared according to the synthetic methods described in Ogata et al. Journal of Organic Chemistry 74:2585-2588, 2009; Purmal et al. Nucleic Acids Research 22(1): 72-78, 1994; Fukuhara et al. Biochemistry 1(4): 563-568, 1962; and Xu et al. Tetrahedron 48(9): 1729-1740, 1992, each of which are incorporated by reference in their entirety.

[0286] Modified nucleic acids (e.g., ribonucleic acids) need not be uniformly modified along the entire length of the molecule. Different nucleotide modifications and/or backbone structures may exist at various positions in the nucleic acid. One of ordinary skill in the art will appreciate that the nucleotide analogs or other modification(s) may be located at any position(s) of a nucleic acid such that the function of the nucleic acid is not substantially decreased. A modification may also be a 5′ or 3′ terminal modification. The nucleic acids may contain at a minimum one and at maximum 100% modified nucleotides, or any intervening percentage, such as at least 50% modified nucleotides, at least 80% modified nucleotides, or at least 90% modified nucleotides.

[0287] In some embodiments, at least one ribonucleic acid is a modified ribonucleic acid. In some embodiments, at least one of the one to two ribonucleic acids is a modified ribonucleic acid. In some embodiments, each of the one to two ribonucleic acids is a modified ribonucleic acid. In some embodiments, at least one of the multiple ribonucleic acids is a modified ribonucleic acid. In some embodiments, a plurality of the multiple ribonucleic acids are modified. In some embodiments, each of the multiple ribonucleic acids is modified. Those skilled in the art will appreciate that the modified ribonucleic acids can include one or more of the nucleic acid modification described herein.

[0288] In some aspects, provided herein are synthetic, modified RNA molecules encoding polypeptides, where the synthetic, modified RNA molecules comprise one or more modifications, such that introducing the synthetic, modified RNA molecules to a cell results in a reduced innate immune response relative to a cell contacted with synthetic RNA molecules encoding the polypeptides not comprising the one or more modifications. In some embodiments, the Cas protein comprises a synthetic, modified RNA molecule encoding a Cas protein. In some embodiments, the Cas protein comprises a synthetic, modified RNA molecule encoding a Cas9 protein. In some embodiments, the Cas protein comprises a synthetic, modified RNA molecule encoding a Cpf1 protein.

[0289] The synthetic, modified RNAs described herein include modifications to prevent rapid degradation by endo- and exo-nucleases and to avoid or reduce the cell's innate immune or interferon response to the RNA. Modifications include, but are not limited to, for example, (a) end modifications, e.g., 5′ end modifications (phosphorylation dephosphorylation, conjugation, inverted linkages, etc.), 3′ end modifications (conjugation, DNA nucleotides, inverted linkages, etc.), (b) base modifications, e.g., replacement with modified bases, stabilizing bases, destabilizing bases, or bases that base pair with an expanded repertoire of partners, or conjugated bases, (c) sugar modifications (e.g., at the 2′ position or 4′ position) or replacement of the sugar, as well as (d) internucleoside linkage modifications, including modification or replacement of the phosphodiester linkages. To the extent that such modifications interfere with translation (i.e., results in a reduction of 50% or more in translation relative to the lack of the modification—e.g., in a rabbit reticulocyte in vitro translation assay), the modification is not suitable for the methods and compositions described herein. Specific examples of synthetic, modified RNA compositions useful with the methods described herein include, but are not limited to, RNA molecules containing modified or non-natural internucleoside linkages. Synthetic, modified RNAs having modified internucleoside linkages include, among others, those that do not have a phosphorus atom in the internucleoside linkage. In other embodiments, the synthetic, modified RNA has a phosphorus atom in its internucleoside linkage(s).

[0290] Non-limiting examples of modified internucleoside linkages include phosphorothioates, chiral phosphorothioates, phosphorodithioates, phosphotriesters, aminoalkylphosphotriesters, methyl and other alkyl phosphonates including 3′-alkylene phosphonates and chiral phosphonates, phosphinates, phosphoramidates including 3′-amino phosphoramidate and aminoalkylphosphoramidates, thionophosphoramidates, thionoalkylphosphonates, thionoalkylphosphotriesters, and boranophosphates having normal 3′-5′ linkages, 2′-5′ linked analogs of these, and those) having inverted polarity wherein the adjacent pairs of nucleoside units are linked 3′-5′ to 5′-3′ or 2′-5′ to 5′-2′. Various salts, mixed salts and free acid forms are also included.

[0291] Representative U.S. patents that teach the preparation of the above phosphorus-containing linkages include, but are not limited to, U.S. Pat. Nos. 3,687,808; 4,469,863; 4,476,301; 5,023,243; 5,177,195; 5,188,897; 5,264,423; 5,276,019; 5,278,302; 5,286,717; 5,321,131; 5,399,676; 5,405,939; 5,453,496; 5,455,233; 5,466,677; 5,476,925; 5,519,126; 5,536,821; 5,541,316; 5,550,111; 5,563,253; 5,571,799; 5,587,361; 5,625,050; 6,028,188; 6,124,445; 6,160,109; 6,169,170; 6,172,209; 6,239,265; 6,277,603; 6,326,199; 6,346,614; 6,444,423; 6,531,590; 6,534,639; 6,608,035; 6,683,167; 6,858,715; 6,867,294; 6,878,805; 7,015,315; 7,041,816; 7,273,933; 7,321,029; and U.S. Pat. RE39464, each of which is herein incorporated by reference in its entirety.

[0292] Modified internucleoside linkages that do not include a phosphorus atom therein have internucleoside linkages that are formed by short chain alkyl or cycloalkyl internucleoside linkages, mixed heteroatoms and alkyl or cycloalkyl internucleoside linkages, or one or more short chain heteroatomic or heterocyclic internucleoside linkages. These include those having morpholino linkages (formed in part from the sugar portion of a nucleoside); siloxane backbones; sulfide, sulfoxide and sulfone backbones; formacetyl and thioformacetyl backbones; methylene formacetyl and thioformacetyl backbones; alkene containing backbones; sulfamate backbones; methyleneimino and methylenehydrazino backbones; sulfonate and sulfonamide backbones; amide backbones; and others having mixed N, O, S and CH2 component parts.

[0293] Representative U.S. patents that teach the preparation of modified oligonucleosides include, but are not limited to, U.S. Pat. Nos. 5,034,506; 5,166,315; 5,185,444; 5,214,134; 5,216,141; 5,235,033; 5,64,562; 5,264,564; 5,405,938; 5,434,257; 5,466,677; 5,470,967; 5,489,677; 5,541,307; 5,561,225; 5,596,086; 5,602,240; 5,608,046; 5,610,289; 5,618,704; 5,623,070; 5,663,312; 5,633,360; 5,677,437; and 5,677,439, each of which is herein incorporated by reference in its entirety.

[0294] Some embodiments of the synthetic, modified RNAs described herein include nucleic acids with phosphorothioate internucleoside linkages and oligonucleosides with heteroatom internucleoside linkage, and in particular —CH2-NH—CH2-, —CH2-N(CH3)-O—CH2-[known as a methylene (methylimino) or MMI], —CH2-O—N(CH3)-CH2-, —CH2-N(CH3)-N(CH3)-CH2- and —N(CH3)-CH2-CH2-[wherein the native phosphodiester internucleoside linkage is represented as —O—P—O—CH2-] of the above-referenced U.S. Pat. No. 5,489,677, and the amide backbones of the above-referenced U.S. Pat. No. 5,602,240, both of which are herein incorporated by reference in their entirety. In some embodiments, the nucleic acid sequences featured herein have morpholino backbone structures of the above-referenced U.S. Pat. No. 5,034,506, herein incorporated by reference in its entirety.

[0295] Synthetic, modified RNAs described herein can also contain one or more substituted sugar moieties. The nucleic acids featured herein can include one of the following at the 2′ position: H (deoxyribose); OH (ribose); F; O-, S-, or N-alkyl; O-, S-, or N-alkenyl; O-, S- or N-alkynyl; or O-alkyl-O-alkyl, wherein the alkyl, alkenyl and alkynyl can be substituted or unsubstituted C1 to C10 alkyl or C2 to C10 alkenyl and alkynyl. Exemplary modifications include O[(CH2)nO]mCH3, O(CH2).nOCH3, O(CH2)nNH2, O(CH2)nCH3, O(CH2)nONH2, and O(CH2)nON[(CH2)nCH3)]2, where n and m are from 1 to about 10. In some embodiments, synthetic, modified RNAs include one of the following at the 2′ position: C1 to C10 lower alkyl, substituted lower alkyl, alkaryl, aralkyl, O-alkaryl or O-aralkyl, SH, SCH3, OCN, Cl, Br; CN, CF3, OCF3, SOCH3, SO2CH3, ONO2, NO2, N3, NH2, heterocycloalkyl, heterocycloalkaryl, aminoalkylamino, polyalkylamino, substituted silyl, a reporter group, an intercalator, a group for improving the pharmacokinetic properties of an RNA, or a group for improving the pharmacodynamic properties of a synthetic, modified RNA, and other substituents having similar properties. In some embodiments, the modification includes a 2′ methoxyethoxy (2′-O—CH2CH2OCH3, also known as 2′-O-(2-methoxyethyl) or 2′-MOE) (Martin et al., Helv. Chim. Acta, 1995, 78:486-504) i.e., an alkoxy-alkoxy group. Another exemplary modification is 2′-dimethylaminooxyethoxy, i.e., a O(CH2)2ON(CH3)2 group, also known as 2′-DMAOE, and 2′-dimethylaminoethoxyethoxy (also known in the art as 2′-O-dimethylaminoethoxyethyl or 2′-DMAEOE), i.e., 2′-O—CH2-O—CH2-N(CH2)2.

[0296] Other modifications include 2′-methoxy (2′-OCH3), 2′-aminopropoxy (2′-OCH2CH2CH2NH2) and 2′-fluoro (2′-F). Similar modifications can also be made at other positions on the nucleic acid sequence, particularly the 3′ position of the sugar on the 3′ terminal nucleotide or in 2′-5′ linked nucleotides and the 5′ position of 5′ terminal nucleotide. A synthetic, modified RNA can also have sugar mimetics such as cyclobutyl moieties in place of the pentofuranosyl sugar. Representative U.S. patents that teach the preparation of such modified sugar structures include, but are not limited to, U.S. Pat. Nos. 4,981,957; 5,118,800; 5,319,080; 5,359,044; 5,393,878; 5,446,137; 5,466,786; 5,514,785; 5,519,134; 5,567,811; 5,576,427; 5,591,722; 5,597,909; 5,610,300; 5,627,053; 5,639,873; 5,646,265; 5,658,873; 5,670,633; and 5,700,920, certain of which are commonly owned with the instant application, and each of which is herein incorporated by reference in its entirety.

[0297] As non-limiting examples, synthetic, modified RNAs described herein can include at least one modified nucleoside including a 2′-O-methyl modified nucleoside, a nucleoside comprising a 5′ phosphorothioate group, a 2′-amino-modified nucleoside, 2′-alkyl-modified nucleoside, morpholino nucleoside, a phosphoramidate or a non-natural base comprising nucleoside, or any combination thereof.

[0298] In some embodiments of this aspect and all other such aspects described herein, the at least one modified nucleoside is selected from the group consisting of 5-methylcytidine (5mC), N6-methyladenosine (m6A), 3,2′-O-dimethyluridine (m4U), 2-thiouridine (s2U), 2′ fluorouridine, pseudouridine, 2′-O-methyluridine (Um), 2′ deoxyuridine (2′ dU), 4-thiouridine (s4U), 5-methyluridine (m5U), 2′-O-methyladenosine (m6A), N6,2′-O-dimethyladenosine (m6Am), N6,N6,2′-O-trimethyladenosine (m62Am), 2′-O-methylcytidine (Cm), 7-methylguanosine (m7G), 2′-O-methylguanosine (Gm), N2,7-dimethylguanosine (m2,7G), N2,N2,7-trimethylguanosine (m2,2,7G), and inosine (I).

[0299] Alternatively, a synthetic, modified RNA can comprise at least two modified nucleosides, at least 3, at least 4, at least 5, at least 6, at least 7, at least 8, at least 9, at least 10, at least 15, at least 20 or more, up to the entire length of the nucleotide. At a minimum, a synthetic, modified RNA molecule comprising at least one modified nucleoside comprises a single nucleoside with a modification as described herein. It is not necessary for all positions in a given synthetic, modified RNA to be uniformly modified, and in fact more than one of the aforementioned modifications can be incorporated in a single synthetic, modified RNA or even at a single nucleoside within a synthetic, modified RNA. However, it is preferred, but not absolutely necessary, that each occurrence of a given nucleoside in a molecule is modified (e.g., each cytosine is a modified cytosine e.g., 5mC). However, it is also contemplated that different occurrences of the same nucleoside can be modified in a different way in a given synthetic, modified RNA molecule (e.g., some cytosines modified as 5mC, others modified as 2′-O-methylcytidine or other cytosine analog). The modifications need not be the same for each of a plurality of modified nucleosides in a synthetic, modified RNA. Furthermore, in some embodiments of the aspects described herein, a synthetic, modified RNA comprises at least two different modified nucleosides. In some such preferred embodiments of the aspects described herein, the at least two different modified nucleosides are 5-methylcytidine and pseudouridine. A synthetic, modified RNA can also contain a mixture of both modified and unmodified nucleosides.

[0300] As used herein, “unmodified” or “natural” nucleosides or nucleobases include the purine bases adenine (A) and guanine (G), and the pyrimidine bases thymine (T), cytosine (C) and uracil (U). In some embodiments, a synthetic, modified RNA comprises at least one nucleoside (“base”) modification or substitution. Modified nucleosides include other synthetic and natural nucleobases such as inosine, xanthine, hypoxanthine, nubularine, isoguanisine, tubercidine, 2-(halo)adenine, 2-(alkyl)adenine, 2-(propyl)adenine, 2 (amino)adenine, 2-(aminoalkyl)adenine, 2 (aminopropyl)adenine, 2 (methylthio) N6 (isopentenyl)adenine, 6 (alkyl)adenine, 6 (methyl)adenine, 7 (deaza)adenine, 8 (alkenyl)adenine, 8-(alkyl)adenine, 8 (alkynyl)adenine, 8 (amino)adenine, 8-(halo)adenine, 8-(hydroxyl)adenine, 8 (thioalkyl)adenine, 8-(thiol)adenine, N6-(isopentyl)adenine, N6 (methyl)adenine, N6, N6 (dimethyl)adenine, 2-(alkyl)guanine, 2 (propyl)guanine, 6-(alkyl)guanine, 6 (methyl)guanine, 7 (alkyl)guanine, 7 (methyl)guanine, 7 (deaza)guanine, 8 (alkyl)guanine, 8-(alkenyl)guanine, 8 (alkynyl)guanine, 8-(amino)guanine, 8 (halo)guanine, 8-(hydroxyl)guanine, 8 (thioalkyl)guanine, 8-(thiol)guanine, N (methyl)guanine, 2-(thio)cytosine, 3 (deaza) 5 (aza)cytosine, 3-(alkyl)cytosine, 3 (methyl)cytosine, 5-(alkyl)cytosine, 5-(alkynyl)cytosine, 5 (halo)cytosine, 5 (methyl)cytosine, 5 (propynyl)cytosine, 5 (propynyl)cytosine, 5 (trifluoromethyl)cytosine, 6-(azo)cytosine, N4 (acetyl)cytosine, 3 (3 amino-3 carboxypropyl)uracil, 2-(thio)uracil, 5 (methyl) 2 (thio)uracil, 5 (methylaminomethyl)-2 (thio)uracil, 4-(thio)uracil, 5 (methyl) 4 (thio)uracil, 5 (methylaminomethyl)-4 (thio)uracil, 5 (methyl) 2,4 (dithio)uracil, 5 (methylaminomethyl)-2,4 (dithio)uracil, 5 (2-aminopropyl)uracil, 5-(alkyl)uracil, 5-(alkynyl)uracil, 5-(allylamino)uracil, 5 (aminoallyl)uracil, 5 (aminoalkyl)uracil, 5 (guanidiniumalkyl)uracil, 5 (1,3-diazole-1-alkyl)uracil, 5-(cyanoalkyl)uracil, 5-(dialkylaminoalkyl)uracil, 5 (dimethylaminoalkyl)uracil, 5-(halo)uracil, 5-(methoxy)uracil, uracil-5 oxyacetic acid, 5 (methoxycarbonylmethyl)-2-(thio)uracil, 5 (methoxycarbonyl-methyl)uracil, 5 (propynyl)uracil, 5 (propynyl)uracil, 5 (trifluoromethyl)uracil, 6 (azo)uracil, dihydrouracil, N3 (methyl)uracil, 5-uracil (i.e., pseudouracil), 2 (thio)pseudouracil, 4 (thio)pseudouracil, 2,4-(dithio)psuedouracil, 5-(alkyl)pseudouracil, 5-(methyl)pseudouracil, 5-(alkyl)-2-(thio)pseudouracil, 5-(methyl)-2-(thio)pseudouracil, 5-(alkyl)-4 (thio)pseudouracil, 5-(methyl)-4 (thio)pseudouracil, 5-(alkyl)-2,4 (dithio)pseudouracil, 5-(methyl)-2,4 (dithio)pseudouracil, 1 substituted pseudouracil, 1 substituted 2(thio)-pseudouracil, 1 substituted 4 (thio)pseudouracil, 1 substituted 2,4-(dithio)pseudouracil, 1 (aminocarbonylethylenyl)-pseudouracil, 1 (aminocarbonylethylenyl)-2(thio)-pseudouracil, 1 (aminocarbonylethylenyl)-4 (thio)pseudouracil, 1 (aminocarbony ethylenyl)-2,4-(dithio)pseudouracil, 1 (aminoalkylaminocarbonylethylenyl)-pseudouracil, 1 (aminoalkylaminocarbonylethylenyl)-2(thio)-pseudouracil, 1 (aminoalkylaminocarbonylethylenyl)-4 (thio)pseudouracil, 1 (aminoalkylaminocarbonylethylenyl)-2,4-(dithio)pseudouracil, 1,3-(diaza)-2-(oxo)-phenoxazin-1-yl, 1-(aza)-2-(thio)-3-(aza)-phenoxazin-1-yl, 1,3 (diaza)-2-(oxo)-phenthiazin-1-yl, 1-(aza)-2-(thio)-3-(aza)-phenthiazin-1-yl, 7-substituted 1,3-(diaza)-2-(oxo)-phenoxazin-1-yl, 7-substituted 1-(aza)-2-(thio)-3-(aza)-phenoxazin-1-yl, 7-substituted 1,3-(diaza)-2-(oxo)-phenthiazin-1-yl, 7-substituted 1-(aza)-2-(thio)-3-(aza)-phenthiazin-1-yl, 7-(aminoalkylhydroxy)-1,3-(diaza)-2-(oxo)-phenoxazin-1-yl, 7-(aminoalkylhydroxy)-1-(aza)-2-(thio)-3-(aza)-phenoxazin-1-yl, 7-(aminoalkylhydroxy)-1,3-(diaza)-2-(oxo)-phenthiazin-1-yl, 7-(aminoalkylhydroxy)-1-(aza)-2-(thio)-3-(aza)-phenthiazin-1-yl, 7-(guanidiniumalkylhydroxy)-1,3-(diaza)-2-(oxo)-phenoxazin-1-yl, 7-(guanidiniumalkylhydroxy)-1-(aza)-2-(thio)-3-(aza)-phenoxazin-1-yl, 7-(guanidiniumalkylhydroxy)-1,3-(diaza)-2-(oxo)-phenthiazin-1-yl, 7-(guanidiniumalkylhydroxy)-1-(aza)-2-(thio)-3-(aza)-phenthiazin-1-yl, 1,3,5-(triaza)-2,6-(dioxa)-naphthalene, inosine, xanthine, hypoxanthine, nubularine, tubercidine, isoguanisine, inosinyl, 2-aza-inosinyl, 7-deaza-inosinyl, nitroimidazolyl, nitropyrazolyl, nitrobenzimidazolyl, nitroindazolyl, aminoindolyl, pyrrolopyrimidinyl, 3-(methyl)isocarbostyrilyl, 5-(methyl)isocarbostyrilyl, 3-(methyl)-7-(propynyl)isocarbostyrilyl, 7-(aza)indolyl, 6-(methyl)-7-(aza)indolyl, imidizopyridinyl, 9-(methyl)-imidizopyridinyl, pyrrolopyrizinyl, isocarbostyrilyl, 7-(propynyl)isocarbostyrilyl, propynyl-7-(aza)indolyl, 2,4,5-(trimethyl)phenyl, 4-(methyl)indolyl, 4,6-(dimethyl)indolyl, phenyl, napthalenyl, anthracenyl, phenanthracenyl, pyrenyl, stilbenzyl, tetracenyl, pentacenyl, difluorotolyl, 4-(fluoro)-6-(methyl)benzimidazole, 4-(methyl)benzimidazole, 6-(azo)thymine, 2-pyridinone, 5 nitroindole, 3 nitropyrrole, 6-(aza)pyrimidine, 2 (amino)purine, 2,6-(diamino)purine, 5 substituted pyrimidines, N2-substituted purines, N6-substituted purines, 06-substituted purines, substituted 1,2,4-triazoles, pyrrolo-pyrimidin-2-on-3-yl, 6-phenyl-pyrrolo-pyrimidin-2-on-3-yl, para-substituted-6-phenyl-pyrrolo-pyrimidin-2-on-3-yl, ortho-substituted-6-phenyl-pyrrolo-pyrimidin-2-on-3-yl, bis-ortho-substituted-6-phenyl-pyrrolo-pyrimidin-2-on-3-yl, para-(aminoalkylhydroxy)-6-phenyl-pyrrolo-pyrimidin-2-on-3-yl, ortho-(aminoalkylhydroxy)-6-phenyl-pyrrolo-pyrimidin-2-on-3-yl, bis-ortho-(aminoalkylhydroxy)-6-phenyl-pyrrolo-pyrimidin-2-on-3-yl, pyridopyrimidin-3-yl, 2-oxo-7-amino-pyridopyrimidin-3-yl, 2-oxo-pyridopyrimidine-3-yl, or any O-alkylated or N-alkylated derivatives thereof. Modified nucleosides also include natural bases that comprise conjugated moieties, e.g. a ligand. As discussed herein above, the RNA containing the modified nucleosides must be translatable in a host cell (i.e., does not prevent translation of the polypeptide encoded by the modified RNA). For example, transcripts containing s2U and m6A are translated poorly in rabbit reticulocyte lysates, while pseudouridine, m5U, and m5C are compatible with efficient translation. In addition, it is known in the art that 2′-fluoro-modified bases useful for increasing nuclease resistance of a transcript, leads to very inefficient translation. Translation can be assayed by one of ordinary skill in the art using e.g., a rabbit reticulocyte lysate translation assay.

[0301] Further modified nucleobases include those disclosed in U.S. Pat. No. 3,687,808, those disclosed in Modified Nucleosides in Biochemistry, Biotechnology and Medicine, Herdewijn, P. ed. Wiley-VCH, 2008; those disclosed in Int. Appl. No. PCT/US09/038,425, filed Mar. 26, 2009; those disclosed in The Concise Encyclopedia Of Polymer Science And Engineering, pages 858-859, Kroschwitz, J. L, ed. John Wiley & Sons, 1990, and those disclosed by Englisch et al., Angewandte Chemie, International Edition, 1991, 30, 613.

[0302] Representative U.S. patents that teach the preparation of certain of the above noted modified nucleobases as well as other modified nucleobases include, but are not limited to, the above noted U.S. Pat. No. 3,687,808, as well as U.S. Pat. Nos. 4,845,205; 5,130,30; 5,134,066; 5,175,273; 5,367,066; 5,432,272; 5,457,187; 5,457,191; 5,459,255; 5,484,908; 5,502,177; 5,525,711; 5,552,540; 5,587,469; 5,594,121, 5,596,091; 5,614,617; 5,681,941; 6,015,886; 6,147,200; 6,166,197; 6,222,025; 6,235,887; 6,380,368; 6,528,640; 6,639,062; 6,617,438; 7,045,610; 7,427,672; and 7,495,088, each of which is herein incorporated by reference in its entirety, and U.S. Pat. No. 5,750,692, also herein incorporated by reference in its entirety.

[0303] Another modification for use with the synthetic, modified RNAs described herein involves chemically linking to the RNA one or more ligands, moieties or conjugates that enhance the activity, cellular distribution or cellular uptake of the RNA. The synthetic, modified RNAs described herein can further comprise a 5′ cap. In some embodiments of the aspects described herein, the synthetic, modified RNAs comprise a 5′ cap comprising a modified guanine nucleotide that is linked to the 5′ end of an RNA molecule using a 5′-5′ triphosphate linkage. As used herein, the term “5′ cap” is also intended to encompass other 5′ cap analogs including, e.g., 5′ diguanosine cap, tetraphosphate cap analogs having a methylene-bis(phosphonate) moiety (see e.g., Rydzik, A M et al., (2009) Org Biomol Chem 7(22):4763-76), dinucleotide cap analogs having a phosphorothioate modification (see e.g., Kowalska, J. et al., (2008) RNA 14(6):1119-1131), cap analogs having a sulfur substitution for a non-bridging oxygen (see e.g., Grudzien-Nogalska, E. et al., (2007) RNA 13(10): 1745-1755), N7-benzylated dinucleoside tetraphosphate analogs (see e.g., Grudzien, E. et al., (2004) RNA 10(9):1479-1487), or anti-reverse cap analogs (see e.g., Jemielity, J. et al., (2003) RNA 9(9): 1108-1122 and Stepinski, J. et al., (2001) RNA 7(10):1486-1495). In one such embodiment, the 5′ cap analog is a 5′ diguanosine cap. In some embodiments, the synthetic, modified RNA does not comprise a 5′ triphosphate.

[0304] The 5′ cap is important for recognition and attachment of an mRNA to a ribosome to initiate translation. The 5′ cap also protects the synthetic, modified RNA from 5′ exonuclease mediated degradation. It is not an absolute requirement that a synthetic, modified RNA comprise a 5′ cap, and thus in other embodiments the synthetic, modified RNAs lack a 5′ cap. However, due to the longer half-life of synthetic, modified RNAs comprising a 5′ cap and the increased efficiency of translation, synthetic, modified RNAs comprising a 5′ cap are preferred herein.

[0305] The synthetic, modified RNAs described herein can further comprise a 5′ and/or 3′ untranslated region (UTR). Untranslated regions are regions of the RNA before the start codon (5′) and after the stop codon (3′), and are therefore not translated by the translation machinery. Modification of an RNA molecule with one or more untranslated regions can improve the stability of an mRNA, since the untranslated regions can interfere with ribonucleases and other proteins involved in RNA degradation. In addition, modification of an RNA with a 5′ and/or 3′ untranslated region can enhance translational efficiency by binding proteins that alter ribosome binding to an mRNA. Modification of an RNA with a 3′ UTR can be used to maintain a cytoplasmic localization of the RNA, permitting translation to occur in the cytoplasm of the cell. In one embodiment, the synthetic, modified RNAs described herein do not comprise a 5′ or 3′ UTR. In another embodiment, the synthetic, modified RNAs comprise either a 5′ or 3′ UTR. In another embodiment, the synthetic, modified RNAs described herein comprise both a 5′ and a 3′ UTR. In one embodiment, the 5′ and/or 3′ UTR is selected from an mRNA known to have high stability in the cell (e.g., a murine alpha-globin 3′ UTR). In some embodiments, the 5′ UTR, the 3′ UTR, or both comprise one or more modified nucleosides.

[0306] In some embodiments, the synthetic, modified RNAs described herein further comprise a Kozak sequence. The “Kozak sequence” refers to a sequence on eukaryotic mRNA having the consensus (gcc)gccRccAUGG, where R is a purine (adenine or guanine) three bases upstream of the start codon (AUG), which is followed by another ‘G’. The Kozak consensus sequence is recognized by the ribosome to initiate translation of a polypeptide. Typically, initiation occurs at the first AUG codon encountered by the translation machinery that is proximal to the 5′ end of the transcript. However, in some cases, this AUG codon can be bypassed in a process called leaky scanning. The presence of a Kozak sequence near the AUG codon will strengthen that codon as the initiating site of translation, such that translation of the correct polypeptide occurs. Furthermore, addition of a Kozak sequence to a synthetic, modified RNA will promote more efficient translation, even if there is no ambiguity regarding the start codon. Thus, in some embodiments, the synthetic, modified RNAs described herein further comprise a Kozak consensus sequence at the desired site for initiation of translation to produce the correct length polypeptide. In some such embodiments, the Kozak sequence comprises one or more modified nucleosides.

[0307] In some embodiments, the synthetic, modified RNAs described herein further comprise a “poly (A) tail”, which refers to a 3′ homopolymeric tail of adenine nucleotides, which can vary in length (e.g., at least 5 adenine nucleotides) and can be up to several hundred adenine nucleotides). The inclusion of a 3′ poly(A) tail can protect the synthetic, modified RNA from degradation in the cell, and also facilitates extra-nuclear localization to enhance translation efficiency. In some embodiments, the poly(A) tail comprises between 1 and 500 adenine nucleotides; in other embodiments the poly(A) tail comprises at least 5, at least 10, at least 20, at least 30, at least 40, at least 50, at least 60, at least 70, at least 80, at least 90, at least 100, at least 110, at least 120, at least 130, at least 140, at least 150, at least 160, at least 170, at least 180, at least 190, at least 200, at least 225, at least 250, at least 275, at least 300, at least 325, at least 350, at least 375, at least 400, at least 425, at least 450, at least 475, at least 500 adenine nucleotides or more. In one embodiment, the poly(A) tail comprises between 1 and 150 adenine nucleotides. In another embodiment, the poly(A) tail comprises between 90 and 120 adenine nucleotides. In some such embodiments, the poly(A) tail comprises one or more modified nucleosides.

[0308] It is contemplated that one or more modifications to the synthetic, modified RNAs described herein permit greater stability of the synthetic, modified RNA in a cell. To the extent that such modifications permit translation and either reduce or do not exacerbate a cell's innate immune or interferon response to the synthetic, modified RNA with the modification, such modifications are specifically contemplated for use herein. Generally, the greater the stability of a synthetic, modified RNA, the more protein can be produced from that synthetic, modified RNA. Typically, the presence of AU-rich regions in mammalian mRNAs tend to destabilize transcripts, as cellular proteins are recruited to AU-rich regions to stimulate removal of the poly(A) tail of the transcript. Loss of a poly(A) tail of a synthetic, modified RNA can result in increased RNA degradation. Thus, in one embodiment, a synthetic, modified RNA as described herein does not comprise an AU-rich region. In particular, it is preferred that the 3′ UTR substantially lacks AUUUA sequence elements.

[0309] In one embodiment, a ligand alters the cellular uptake, intracellular targeting or half-life of a synthetic, modified RNA into which it is incorporated. In some embodiments a ligand provides an enhanced affinity for a selected target, e.g., molecule, cell or cell type, intracellular compartment, e.g., mitochondria, cytoplasm, peroxisome, lysosome, as, e.g., compared to a composition absent such a ligand. Preferred ligands do not interfere with expression of a polypeptide from the synthetic, modified RNA.

[0310] The ligand can be a substance, e.g., a drug, which can increase the uptake of the synthetic, modified RNA or a composition thereof into the cell, for example, by disrupting the cell's cytoskeleton, e.g., by disrupting the cell's microtubules, microfilaments, and/or intermediate filaments. The drug can be, for example, taxol, vincristine, vinblastine, cytochalasin, nocodazole, japlakinolide, latrunculin A, phalloidin, swinholide A, indanocine, or myoservin.

[0311] In another aspect, the ligand is a moiety, e.g., a vitamin, which is taken up by a host cell. Exemplary vitamins include vitamin A, E, and K. Other exemplary vitamins include B vitamin, e.g., folic acid, B12, riboflavin, biotin, pyridoxal or other vitamins or nutrients taken up, for example, by cancer cells. Also included are HSA and low density lipoprotein (LDL).

[0312] In another aspect, the ligand is a cell-permeation agent, preferably a helical cell-permeation agent. Preferably, the agent is amphipathic. An exemplary agent is a peptide such as tat or antennopedia. If the agent is a peptide, it can be modified, including a peptidylmimetic, invertomers, non-peptide or pseudo-peptide linkages, and use of D-amino acids. The helical agent is preferably an alpha-helical agent, which preferably has a lipophilic and a lipophobic phase.

[0313] A “cell permeation peptide” is capable of permeating a cell, e.g., a microbial cell, such as a bacterial or fungal cell, or a mammalian cell, such as a human cell. A microbial cell-permeating peptide can be, for example, an α-helical linear peptide (e.g., LL-37 or Ceropin P1), a disulfide bond-containing peptide (e.g., α-defensin, β-defensin or bactenecin), or a peptide containing only one or two dominating amino acids (e.g., PR-39 or indolicidin). For example, a cell permeation peptide can be a bipartite amphipathic peptide, such as MPG, which is derived from the fusion peptide domain of HIV-1 gp41 and the NLS of SV40 large T antigen (Simeoni et al., Nucl. Acids Res. 31:2717-2724, 2003).

[0314] The synthetic, modified RNAs described herein can be synthesized and/or modified by methods well established in the art, such as those described in “Current Protocols in Nucleic Acid Chemistry,” Beaucage, S. L. et al. (Edrs.), John Wiley & Sons, Inc., New York, N.Y., USA, which is hereby incorporated herein by reference in its entirety. Transcription methods are described further herein in the Examples. In one embodiment of the aspects described herein, a template for a synthetic, modified RNA is synthesized using “splint-mediated ligation,” which allows for the rapid synthesis of DNA constructs by controlled concatenation of long oligos and/or dsDNA PCR products and without the need to introduce restriction sites at the joining regions. It can be used to add generic untranslated regions (UTRs) to the coding sequences of genes during T7 template generation. Splint mediated ligation can also be used to add nuclear localization sequences to an open reading frame, and to make dominant-negative constructs with point mutations starting from a wild-type open reading frame. Briefly, single-stranded and/or denatured dsDNA components are annealed to splint oligos which bring the desired ends into conjunction, the ends are ligated by a thermostable DNA ligase and the desired constructs amplified by PCR. A synthetic, modified RNA is then synthesized from the template using an RNA polymerase in vitro. After synthesis of a synthetic, modified RNA is complete, the DNA template is removed from the transcription reaction prior to use with the methods described herein.

[0315] In some embodiments of these aspects, the synthetic, modified RNAs are further treated with an alkaline phosphatase.

[0316] One skilled in the art readily appreciates that the present invention is well adapted to carry out the objects and obtain the ends and advantages mentioned, as well as those inherent therein. The details of the description and the examples herein are representative of certain embodiments, are exemplary, and are not intended as limitations on the scope of the invention. Modifications therein and other uses will occur to those skilled in the art. These modifications are encompassed within the spirit of the invention. It will be readily apparent to a person skilled in the art that varying substitutions and modifications may be made to the invention disclosed herein without departing from the scope and spirit of the invention.

[0317] The articles “a” and “an” as used herein in the specification and in the claims, unless clearly indicated to the contrary, should be understood to include the plural referents. Claims or descriptions that include “or” between one or more members of a group are considered satisfied if one, more than one, or all of the group members are present in, employed in, or otherwise relevant to a given product or process unless indicated to the contrary or otherwise evident from the context. The invention includes embodiments in which exactly one member of the group is present in, employed in, or otherwise relevant to a given product or process. The invention also includes embodiments in which more than one, or all of the group members are present in, employed in, or otherwise relevant to a given product or process. Furthermore, it is to be understood that the invention provides all variations, combinations, and permutations in which one or more limitations, elements, clauses, descriptive terms, etc., from one or more of the listed claims is introduced into another claim dependent on the same base claim (or, as relevant, any other claim) unless otherwise indicated or unless it would be evident to one of ordinary skill in the art that a contradiction or inconsistency would arise. It is contemplated that all embodiments described herein are applicable to all different aspects of the invention where appropriate. It is also contemplated that any of the embodiments or aspects can be freely combined with one or more other such embodiments or aspects whenever appropriate. Where elements are presented as lists, e.g., in Markush group or similar format, it is to be understood that each subgroup of the elements is also disclosed, and any element(s) can be removed from the group. It should be understood that, in general, where the invention, or aspects of the invention, is/are referred to as comprising particular elements, features, etc., certain embodiments of the invention or aspects of the invention consist, or consist essentially of, such elements, features, etc. For purposes of simplicity those embodiments have not in every case been specifically set forth in so many words herein. It should also be understood that any embodiment or aspect of the invention can be explicitly excluded from the claims, regardless of whether the specific exclusion is recited in the specification. For example, any one or more active agents, additives, ingredients, optional agents, types of organism, disorders, subjects, or combinations thereof, can be excluded.

[0318] Where the claims or description relate to a composition of matter, it is to be understood that methods of making or using the composition of matter according to any of the methods disclosed herein, and methods of using the composition of matter for any of the purposes disclosed herein are aspects of the invention, unless otherwise indicated or unless it would be evident to one of ordinary skill in the art that a contradiction or inconsistency would arise. Where the claims or description relate to a method, e.g., it is to be understood that methods of making compositions useful for performing the method, and products produced according to the method, are aspects of the invention, unless otherwise indicated or unless it would be evident to one of ordinary skill in the art that a contradiction or inconsistency would arise.

[0319] Where ranges are given herein, the invention includes embodiments in which the endpoints are included, embodiments in which both endpoints are excluded, and embodiments in which one endpoint is included and the other is excluded. It should be assumed that both endpoints are included unless indicated otherwise. Furthermore, it is to be understood that unless otherwise indicated or otherwise evident from the context and understanding of one of ordinary skill in the art, values that are expressed as ranges can assume any specific value or subrange within the stated ranges in different embodiments of the invention, to the tenth of the unit of the lower limit of the range, unless the context clearly dictates otherwise. It is also understood that where a series of numerical values is stated herein, the invention includes embodiments that relate analogously to any intervening value or range defined by any two values in the series, and that the lowest value may be taken as a minimum and the greatest value may be taken as a maximum. Numerical values, as used herein, include values expressed as percentages. For any embodiment of the invention in which a numerical value is prefaced by “about” or “approximately”, the invention includes an embodiment in which the exact value is recited. For any embodiment of the invention in which a numerical value is not prefaced by “about” or “approximately”, the invention includes an embodiment in which the value is prefaced by “about” or “approximately”.

[0320] As used herein “A and/or B”, where A and B are different claim terms, generally means at least one of A, B, or both A and B. For example, one sequence which is complementary to and/or hybridizes to another sequence includes (i) one sequence which is complementary to the other sequence even though the one sequence may not necessarily hybridize to the other sequence under all conditions, (ii) one sequence which hybridizes to the other sequence even if the one sequence is not perfectly complementary to the other sequence, and (iii) sequences which are both complementary to and hybridize to the other sequence.

[0321] “Approximately” or “about” generally includes numbers that fall within a range of 1% or in some embodiments within a range of 5% of a number or in some embodiments within a range of 10% of a number in either direction (greater than or less than the number) unless otherwise stated or otherwise evident from the context (except where such number would impermissibly exceed 100% of a possible value). It should be understood that, unless clearly indicated to the contrary, in any methods claimed herein that include more than one act, the order of the acts of the method is not necessarily limited to the order in which the acts of the method are recited, but the invention includes embodiments in which the order is so limited. It should also be understood that unless otherwise indicated or evident from the context, any product or composition described herein may be considered “isolated”.

[0322] As used herein the term “comprising” or “comprises” is used in reference to compositions, methods, and respective component(s) thereof, that are essential to the invention, yet open to the inclusion of unspecified elements, whether essential or not. As used herein the term “consisting essentially of” refers to those elements required for a given embodiment. The term permits the presence of additional elements that do not materially affect the basic and novel or functional characteristic(s) of that embodiment of the invention.

[0323] The term “consisting of” refers to compositions, methods, and respective components thereof as described herein, which are exclusive of any element not recited in that description of the embodiment.

### EXAMPLES

### Example 1

### Identification of CRISPR Guide Ribonucleic Acids (gRNAs) that Efficiently Remove the Endogenous TCR from Primary Human T Cells to Prevent Autoreactivity of CAR T Cells

[0324] Prevention of autoreactivity is of highest priority to improve on existing T cell-based therapies. The inventors aimed to develop gRNAs with high on-target and no/low off target activity that allow for the efficient and safe deletion of the endogenous T cell receptor (TCR) in primary human T cells. The inventors designed multiple gRNAs against the TCR alpha and beta chain loci (TRA and TRB), located on chromosome 14 and 7, respectively (FIG. 10). Each gRNA was first tested for the ability to direct site-specific mutations in HEK293T cells, using the SURVEYOR™ assay (data not shown). Candidate gRNAs with the highest on-target efficiency were subsequently evaluated for functional TCR ablation in Jurkat T cells by flow cytometry (FACS) and SURVEYOR™ assay (FIG. 11A and FIG. 11B). Guides were either delivered by lentiviral transduction or transiently by nucleofection. We observed loss of TCR expression by FACS analysis in primary human T cells (FIG. 12A) and confirmed CRISPR cutting in T cells obtained from two independent donors using the SURVEYOR™ assay (FIG. 12B).

### Example 2

### Allogeneic T Cells for CAR-T Therapies

[0325] T cell-based therapies are currently limited to infusion of autologous cells obtained from the same patient. Extending the T cell origin to an allogeneic source by creating a universally applicable cell product would not only greatly reduce the costs but also open the door to a much broader range of patients for this novel and promising class of therapies.

[0326] Complete loss of MHC class I surface expression can be accomplished using CRISPR gRNAs targeting the gene encoding the accessory chain beta2microglobulin (B2M). The inventors have recently identified g RNAs targeting B2M with unrivaled high on-target efficiency that may already be suitable for gene therapy (Mandal et al., “Efficient Ablation of Genes in Human Hematopoietic Stem and Effector Cells using CRISPR/Cas9” Cell Stem Cell, 15:5, 643-652 (2014); Meissner et al., “Genome editing for human gene therapy,” Methods in enzymology, 546, 273-295 (2014); U.S. Appl. No. 62/076,424 and PCT application PCT/US2015/059621, the teachings of which are incorporated herein by reference). As the CRISPR/Cas9 system allows multiplexing, B2M gRNA can be successfully used together with gRNAs for the TCRa and TCRb chains in primary T cells and subsequently in an adoptive transfer model in humanized mice, for example, to enable the use of allogeneic T cells for CAR-T therapies.

[0327] In addition, the inventors recently generated and characterized B2M knock out JEG3 cells using TALENs. These results demonstrated that genomic deletion of B2M using the TALENs genomic editing system results in complete abrogation of surface expression of B2M and all MHC class I molecules (FIGS. 26A-26G).

### Example 3

### Prevention of T Cell Inhibition by Targeting the Checkpoint Regulators of T Cell Activation, PD-1 and CTLA4

[0328] To overcome T cell inhibition, for example by cancerous cells or the tumor environment, the inventors developed gRNAs targeting critical checkpoint regulators of T cell activity. A similar approach as described for the TCR alpha and beta chains was taken: multiple gRNAs directed against the genes encoding PD-1 (PDCD1) and CTLA4 (CTLA4), both located on human chromosome 2, were first tested for their on-target cutting efficiency in HEK293T cells (FIG. 13 and FIG. 15, respectively). Cutting was confirmed at both loci using a PCR-based strategy followed by sequencing (FIG. 13C and FIG. 15C), as well as by SURVEYOR™ assay (FIG. 14B and FIG. 16B). A reduction of PD-1 expression was confirmed by FACS analysis in activated Jurkat T cells (FIG. 14A).

1. A modified primary human T cell comprising a modified genome comprising:
(a) a first genomic modification in which the cytotoxic T-lymphocyte-associated protein 4 (CTLA4) gene on chromosome 2 has been edited to delete a first contiguous stretch of genomic DNA, thereby reducing or eliminating CTLA4 receptor surface expression and/or activity in the cell;
(b) a second genomic modification in which the programmed cell death 1 (PD1) gene on chromosome 2 has been edited to delete a second contiguous stretch of genomic DNA, thereby reducing or eliminating PD1 receptor surface expression and/or activity in the cell;
(c)(i) a third genomic modification in which the gene encoding the T cell receptor (TCR) alpha chain locus on chromosome 14 has been edited to delete a third contiguous stretch of genomic DNA, and/or
(c)(ii) a fourth genomic modification in which the gene encoding the TCR beta chain locus on chromosome 7 has been edited to delete a fourth contiguous stretch of genomic DNA, thereby reducing or eliminating TCR surface expression and/or activity in the cell; and
(d) a fifth genomic modification in which the β2-microglobulin (B2M) gene on chromosome 15 has been edited to delete a fifth contiguous stretch of genomic DNA, thereby reducing or eliminating MHC Class I molecule surface expression and/or activity in the cell; and
each cell optionally comprising:
(e)(i) at least one chimeric antigen receptor that specifically binds to an antigen or epitope of interest expressed on the surface of at least one of a damaged cell, a dysplastic cell, an infected cell, an immunogenic cell, an inflamed cell, a malignant cell, a metaplastic cell, a mutant cell, and combinations thereof, or an exogenous nucleic acid encoding the at least one chimeric antigen receptor, and/or
(e)(ii) at least one exogenous protein that modulates a biological effect of interest in an adjacent cell, tissue, or organ, or an exogenous nucleic acid encoding the protein.

2. A modified primary human T cell comprising a modified genome comprising:
(a) a first genomic modification in which the cytotoxic T-lymphocyte-associated protein 4 (CTLA4) gene on chromosome 2 has been edited to delete a first contiguous stretch of genomic DNA comprising an intron flanked by at least a portion of an adjacent upstream exon and at least a portion of an adjacent downstream exon, and the 3′ end of the genomic DNA upstream with respect to the 5′ end of the deleted first contiguous stretch of genomic DNA is covalently joined to the 5′ end of the genomic DNA downstream with respect to the 3′ end of the deleted first contiguous stretch of genomic DNA to result in a modified CTLA4 gene on chromosome 2 that lacks the first contiguous stretch of genomic DNA, thereby reducing or eliminating CTLA4 receptor surface expression and/or activity in the cell; and/or
(b) a second genomic modification in which the programmed cell death 1 (PD1) gene on chromosome 2 has been edited to delete a second contiguous stretch of genomic DNA comprising an intron flanked by at least a portion of an adjacent upstream exon and at least a portion of an adjacent downstream exon, and the 3′ end of the genomic DNA upstream with respect to the deleted second contiguous stretch of genomic DNA is covalently joined to the 5′ end of the genomic DNA downstream with respect to the 3′ end of the deleted second contiguous stretch of genomic DNA to result in a modified PD1 gene on chromosome 2 that lacks the second contiguous stretch of genomic DNA, thereby reducing or eliminating PD1 receptor surface expression and/or activity in the cell.

3. (canceled)

4. (canceled)

5. The cell of claim 2, further comprising:
(c)(i) a third genomic modification in which the gene encoding the T cell receptor (TCR) alpha chain locus on chromosome 14 has been edited to delete a third contiguous stretch of genomic DNA comprising at least a portion of a coding exon, and/or
(c)(ii) a fourth genomic modification in which the gene encoding the TCR beta chain locus on chromosome 7 has been edited to delete a fourth contiguous stretch of genomic DNA comprising at least a portion of a coding exon, thereby reducing or eliminating TCR surface expression and/or activity in the cell.

6. (canceled)

7. (canceled)

8. The cell of claim 2, further comprising:
(d) a fifth genomic modification in which the β2-microglobulin (B2M) gene on chromosome 15 has been edited to delete a fifth contiguous stretch of genomic DNA, thereby reducing or eliminating MHC Class I molecule surface expression and/or activity in the cell.

9. (canceled)

10. (canceled)

11. The cell of claim 2, further comprising a chimeric antigen receptor or an exogenous nucleic acid encoding the chimeric antigen receptor.

12. The cell of claim 11, wherein the chimeric antigen receptor specifically binds to an antigen or epitope of interest expressed on the surface of at least one of a damaged cell, a dysplastic cell, an infected cell, an immunogenic cell, an inflamed cell, a malignant cell, a metaplastic cell, a mutant cell, and combinations thereof.

13. The cell of claim 2, further comprising at least one exogenous protein that modulates a biological effect of interest in an adjacent cell, tissue, or organ, or an exogenous nucleic acid encoding the protein.

14. The cell of claim 1, wherein the T cell is selected from the group consisting of cytotoxic T-cells, helper T-cells, memory T-cells, regulatory T-cells, tissue infiltrating lymphocytes, and combinations thereof.

15. The cell of claim 1, wherein the cell is obtained from a subject suffering from, being treated for, diagnosed with, at risk of developing, or suspected of having, a disorder selected from the group consisting of an autoimmune disorder, cancer, a chronic infectious disease, and graft versus host disease (GVHD).

16. A method for producing a modified primary human T cell, the method comprising:
(a) editing the cytotoxic T-lymphocyte-associated protein 4 (CTLA4) gene on chromosome 2 in a primary human T cell to delete a first contiguous stretch of genomic DNA, thereby reducing or eliminating CTLA4 receptor surface expression and/or activity in the cell;
(b) editing the programmed cell death 1 (PD1) gene on chromosome 2 in the cell to delete a second contiguous stretch of genomic DNA, thereby reducing or eliminating PD1 receptor surface expression and/or activity in the cell;
(c)(i) editing the gene encoding the T cell receptor (TCR) alpha chain locus on chromosome 14 in the cell to delete a third contiguous stretch of genomic DNA, and/or
(c)(ii) editing the gene encoding the TCR beta chain locus on chromosome 7 in the cell to delete a fourth contiguous stretch of genomic DNA, thereby reducing or eliminating TCR surface expression and/or activity in the cell; and
(d) editing the β2-microglobulin (B2M) gene on chromosome 15 in the cell to delete a fifth contiguous stretch of genomic DNA, thereby reducing or eliminating MHC Class I molecule surface expression and/or activity in the cell; and
optionally comprising
(e)(i) causing the cell to express at least one chimeric antigen receptor that specifically binds to an antigen or epitope of interest expressed on the surface of at least one of a damaged cell, a dysplastic cell, an infected cell, an immunogenic cell, an inflamed cell, a malignant cell, a metaplastic cell, a mutant cell, and combinations thereof, and/or
(e)(ii) causing the cell to express at least one protein that modulates a biological effect of interest in an adjacent cell, tissue, or organ,
wherein the editing in (a)-(d) comprises contacting the cell with a Cas protein or a nucleic acid encoding the Cas protein, and
at least one first pair of guide RNA sequences to delete the first contiguous stretch of genomic DNA from the gene in (a),
at least one second pair of guide RNA sequences to delete the second contiguous stretch of genomic DNA from the gene in (b),
at least one third pair of guide RNA sequences to delete the third contiguous stretch of genomic DNA from the gene in (c)(i), and/or
at least one fourth pair of guide RNA sequences to delete the fourth contiguous stretch of genomic DNA from the gene in (c)(ii), and
at least one fifth pair of guide RNA sequences to delete the fifth contiguous stretch of genomic DNA from the gene in (d).

17. A method for producing a modified primary human T cell, the method comprising:
(a) editing the cytotoxic T-lymphocyte-associated protein 4 (CTLA4) gene on chromosome 2 in a primary human T cell to delete a first contiguous stretch of genomic DNA comprising an intron flanked by at least a portion of an adjacent upstream exon and at least a portion of an adjacent downstream exon, and the 3′ end of the genomic DNA upstream with respect to the 5′ end of the deleted first contiguous stretch of genomic DNA is covalently joined to the 5′ end of the genomic DNA downstream with respect to the 3′ end of the deleted first contiguous stretch of genomic DNA to result in a modified CTLA4 gene on chromosome 2 that lacks the first contiguous stretch of genomic DNA, thereby reducing or eliminating CTLA4 receptor surface expression and/or activity in the cell; and/or
(b) editing the programmed cell death 1 (PD1) gene on chromosome 2 in a primary human T cell to delete a second contiguous stretch of genomic DNA comprising an intron flanked by at least a portion of an adjacent upstream exon and at least a portion of an adjacent downstream exon, and the 3′ end of the genomic DNA upstream with respect to the deleted second contiguous stretch of genomic DNA is covalently joined to the 5′ end of the genomic DNA downstream with respect to the 3′ end of the deleted second contiguous stretch of genomic DNA to result in a modified PD1 gene on chromosome 2 that lacks the second contiguous stretch of genomic DNA, thereby reducing or eliminating PD1 receptor surface expression and/or activity in the cell.

18. (canceled)

19. (canceled)

20. The method of claim 17, further comprising:
(c)(i) editing the gene encoding the T cell receptor (TCR) alpha chain locus on chromosome 14 in the cell to delete a third contiguous stretch of genomic DNA comprising at least a portion of a coding exon, and/or
(c)(ii) editing the gene encoding the TCR beta chain locus on chromosome 7 in the cell to delete a fourth contiguous stretch of genomic DNA comprising at least a portion of a coding exon, thereby reducing or eliminating TCR surface expression and/or activity in the cell.

21. (canceled)

22. (canceled)

23. The method of claim 17, further comprising: (d) editing the β2-microglobulin (B2M) gene on chromosome 15 in the cell to delete a fifth contiguous stretch of genomic DNA, thereby reducing or eliminating MHC Class I molecule surface expression and/or activity in the cell.

24. (canceled)

25. (canceled)

26. The method of claim 17, further comprising causing the cell to express at least one chimeric antigen receptor that specifically binds to an antigen or epitope of interest expressed on the surface of at least one of a damaged cell, a dysplastic cell, an infected cell, an immunogenic cell, an inflamed cell, a malignant cell, a metaplastic cell, a mutant cell, and combinations thereof.

27. The method of claim 17, further comprising causing the cell to express at least one protein that modulates a biological effect of interest in an adjacent cell, tissue, or organ when the cell is in proximity to the adjacent cell, tissue, or organ.

28. The method of claim 16, wherein the T cell is selected from the group consisting of cytotoxic T-cells, helper T-cells, memory T-cells, regulatory T-cells, tissue infiltrating lymphocytes, and combinations thereof.

29. The method of claim 16, wherein the cell is obtained from a subject suffering from, being treated for, diagnosed with, at risk of developing, or suspected of having, a disorder selected from the group consisting of an autoimmune disorder, cancer, a chronic infectious disease, and graft versus host disease (GVHD).

30. (canceled)

31. A method of treating a patient in need thereof, the method comprising:
(a)(i) administering a modified T cell according to claim 86 to a patient in need of such cells.

32. The method of claim 31, wherein the treatment comprises adoptive immunotherapy.

33.-85. (canceled)

86. A modified primary human T cell comprising a modified genome comprising:
(a) a first genomic modification in which the cytotoxic T-lymphocyte-associated protein 4 (CTLA4) gene on chromosome 2 has been edited to reduce or eliminate CTLA4 receptor surface expression and/or activity in the cell;
(b) a second genomic modification in which the programmed cell death 1 (PD1) gene on chromosome 2 has been edited to reduce or eliminate PD1 receptor surface expression and/or activity in the cell;
(c)(i) a third genomic modification in which the gene encoding the T cell receptor (TCR) alpha chain locus on chromosome 14 has been edited to reduce or eliminate TCR surface expression and/or activity in the cell, and/or
(c)(ii) a fourth genomic modification in which the gene encoding the TCR beta chain locus on chromosome 7 has been edited to reduce or eliminate TCR surface expression and/or activity in the cell; and
(d) a fifth genomic modification in which the β2-microglobulin (B2M) gene on chromosome 15 has been edited to reduce or eliminate MHC Class I molecule surface expression and/or activity in the cell;
each cell optionally comprising:
(e)(i) at least one chimeric antigen receptor that specifically binds to an antigen or epitope of interest expressed on the surface of at least one of a damaged cell, a dysplastic cell, an infected cell, an immunogenic cell, an inflamed cell, a malignant cell, a metaplastic cell, a mutant cell, and combinations thereof, or an exogenous nucleic acid encoding the at least one chimeric antigen receptor, and/or
(e)(ii) at least one exogenous protein that modulates a biological effect of interest in an adjacent cell, tissue, or organ, or an exogenous nucleic acid encoding the protein.

The application's sequence listing, which the Patent Office published only in electronic form, follows.

SEQUENCE LISTING (13736 sequences)

SEQ ID NO: 1 - DNA, 20 bp, Unknown
  Description of Unknown: gRNA target site sequence
tggcttgccttggatttcag

SEQ ID NO: 2 - DNA, 20 bp, Unknown
  Description of Unknown: gRNA target site sequence
gccttggatttcagcggcac

SEQ ID NO: 3 - DNA, 20 bp, Unknown
  Description of Unknown: gRNA target site sequence
ccttggatttcagcggcaca

SEQ ID NO: 4 - DNA, 20 bp, Unknown
  Description of Unknown: gRNA target site sequence
gatttcagcggcacaaggct

SEQ ID NO: 5 - DNA, 20 bp, Unknown
  Description of Unknown: gRNA target site sequence
gcacaaggctcagctgaacc

SEQ ID NO: 6 - DNA, 20 bp, Unknown
  Description of Unknown: gRNA target site sequence
gctcagctgaacctggctac

SEQ ID NO: 7 - DNA, 20 bp, Unknown
  Description of Unknown: gRNA target site sequence
ctcagctgaacctggctacc

SEQ ID NO: 8 - DNA, 20 bp, Unknown
  Description of Unknown: gRNA target site sequence
tgaacctggctaccaggacc

SEQ ID NO: 9 - DNA, 20 bp, Unknown
  Description of Unknown: gRNA target site sequence
cttcatccctgtcttctgca

SEQ ID NO: 10 - DNA, 20 bp, Unknown
  Description of Unknown: gRNA target site sequence
cttctgcaaagcaatgcacg

SEQ ID NO: 11 - DNA, 20 bp, Unknown
  Description of Unknown: gRNA target site sequence
gcaaagcaatgcacgtggcc

SEQ ID NO: 12 - DNA, 20 bp, Unknown
  Description of Unknown: gRNA target site sequence
gcacgtggcccagcctgctg

SEQ ID NO: 13 - DNA, 20 bp, Unknown
  Description of Unknown: gRNA target site sequence
ggcccagcctgctgtggtac

SEQ ID NO: 14 - DNA, 20 bp, Unknown
  Description of Unknown: gRNA target site sequence
cagcctgctgtggtactggc

SEQ ID NO: 15 - DNA, 20 bp, Unknown
  Description of Unknown: gRNA target site sequence
cctgctgtggtactggccag

SEQ ID NO: 16 - DNA, 20 bp, Unknown
  Description of Unknown: gRNA target site sequence
tgtggtactggccagcagcc

SEQ ID NO: 17 - DNA, 20 bp, Unknown
  Description of Unknown: gRNA target site sequence
gtggtactggccagcagccg

SEQ ID NO: 18 - DNA, 20 bp, Unknown
  Description of Unknown: gRNA target site sequence
gccagcagccgaggcatcgc

SEQ ID NO: 19 - DNA, 20 bp, Unknown
  Description of Unknown: gRNA target site sequence
gcatcgccagctttgtgtgt

SEQ ID NO: 20 - DNA, 20 bp, Unknown
  Description of Unknown: gRNA target site sequence
tgtgtgtgagtatgcatctc

SEQ ID NO: 21 - DNA, 20 bp, Unknown
  Description of Unknown: gRNA target site sequence
gtgtgtgagtatgcatctcc

SEQ ID NO: 22 - DNA, 20 bp, Unknown
  Description of Unknown: gRNA target site sequence
tgagtatgcatctccaggca

SEQ ID NO: 23 - DNA, 20 bp, Unknown
  Description of Unknown: gRNA target site sequence
catctccaggcaaagccact

SEQ ID NO: 24 - DNA, 20 bp, Unknown
  Description of Unknown: gRNA target site sequence
atctccaggcaaagccactg

SEQ ID NO: 25 - DNA, 20 bp, Unknown
  Description of Unknown: gRNA target site sequence
caggcaaagccactgaggtc

SEQ ID NO: 26 - DNA, 20 bp, Unknown
  Description of Unknown: gRNA target site sequence
aggcaaagccactgaggtcc

SEQ ID NO: 27 - DNA, 20 bp, Unknown
  Description of Unknown: gRNA target site sequence
agccactgaggtccgggtga

SEQ ID NO: 28 - DNA, 20 bp, Unknown
  Description of Unknown: gRNA target site sequence
aggtccgggtgacagtgctt

SEQ ID NO: 29 - DNA, 20 bp, Unknown
  Description of Unknown: gRNA target site sequence
tccgggtgacagtgcttcgg

SEQ ID NO: 30 - DNA, 20 bp, Unknown
  Description of Unknown: gRNA target site sequence
ccgggtgacagtgcttcggc

SEQ ID NO: 31 - DNA, 20 bp, Unknown
  Description of Unknown: gRNA target site sequence
acagtgcttcggcaggctga

SEQ ID NO: 32 - DNA, 20 bp, Unknown
  Description of Unknown: gRNA target site sequence
tgcttcggcaggctgacagc

SEQ ID NO: 33 - DNA, 20 bp, Unknown
  Description of Unknown: gRNA target site sequence
gcttcggcaggctgacagcc

SEQ ID NO: 34 - DNA, 20 bp, Unknown
  Description of Unknown: gRNA target site sequence
ggctgacagccaggtgactg

SEQ ID NO: 35 - DNA, 20 bp, Unknown
  Description of Unknown: gRNA target site sequence
ccaggtgactgaagtctgtg

SEQ ID NO: 36 - DNA, 20 bp, Unknown
  Description of Unknown: gRNA target site sequence
ctgtgcggcaacctacatga

SEQ ID NO: 37 - DNA, 20 bp, Unknown
  Description of Unknown: gRNA target site sequence
tgtgcggcaacctacatgat

SEQ ID NO: 38 - DNA, 20 bp, Unknown
  Description of Unknown: gRNA target site sequence
gtgcggcaacctacatgatg

SEQ ID NO: 39 - DNA, 20 bp, Unknown
  Description of Unknown: gRNA target site sequence
caacctacatgatggggaat

SEQ ID NO: 40 - DNA, 20 bp, Unknown
  Description of Unknown: gRNA target site sequence
ggggaatgagttgaccttcc

SEQ ID NO: 41 - DNA, 20 bp, Unknown
  Description of Unknown: gRNA target site sequence
cctagatgattccatctgca

SEQ ID NO: 42 - DNA, 20 bp, Unknown
  Description of Unknown: gRNA target site sequence
ctagatgattccatctgcac

SEQ ID NO: 43 - DNA, 20 bp, Unknown
  Description of Unknown: gRNA target site sequence
tccatctgcacgggcacctc

SEQ ID NO: 44 - DNA, 20 bp, Unknown
  Description of Unknown: gRNA target site sequence
atctgcacgggcacctccag

SEQ ID NO: 45 - DNA, 20 bp, Unknown
  Description of Unknown: gRNA target site sequence
gggcacctccagtggaaatc

SEQ ID NO: 46 - DNA, 20 bp, Unknown
  Description of Unknown: gRNA target site sequence
tcaagtgaacctcactatcc

SEQ ID NO: 47 - DNA, 20 bp, Unknown
  Description of Unknown: gRNA target site sequence
caagtgaacctcactatcca

SEQ ID NO: 48 - DNA, 20 bp, Unknown
  Description of Unknown: gRNA target site sequence
aacctcactatccaaggact

SEQ ID NO: 49 - DNA, 20 bp, Unknown
  Description of Unknown: gRNA target site sequence
acctcactatccaaggactg

SEQ ID NO: 50 - DNA, 20 bp, Unknown
  Description of Unknown: gRNA target site sequence
cctcactatccaaggactga

SEQ ID NO: 51 - DNA, 20 bp, Unknown
  Description of Unknown: gRNA target site sequence
tatccaaggactgagggcca

SEQ ID NO: 52 - DNA, 20 bp, Unknown
  Description of Unknown: gRNA target site sequence
aggactgagggccatggaca

SEQ ID NO: 53 - DNA, 20 bp, Unknown
  Description of Unknown: gRNA target site sequence
ggactgagggccatggacac

SEQ ID NO: 54 - DNA, 20 bp, Unknown
  Description of Unknown: gRNA target site sequence
acacgggactctacatctgc

SEQ ID NO: 55 - DNA, 20 bp, Unknown
  Description of Unknown: gRNA target site sequence
cacgggactctacatctgca

SEQ ID NO: 56 - DNA, 20 bp, Unknown
  Description of Unknown: gRNA target site sequence
gggactctacatctgcaagg

SEQ ID NO: 57 - DNA, 20 bp, Unknown
  Description of Unknown: gRNA target site sequence
gactctacatctgcaaggtg

SEQ ID NO: 58 - DNA, 20 bp, Unknown
  Description of Unknown: gRNA target site sequence
gtacccaccgccatactacc

SEQ ID NO: 59 - DNA, 20 bp, Unknown
  Description of Unknown: gRNA target site sequence
tacccaccgccatactacct

SEQ ID NO: 60 - DNA, 20 bp, Unknown
  Description of Unknown: gRNA target site sequence
accgccatactacctgggca

SEQ ID NO: 61 - DNA, 20 bp, Unknown
  Description of Unknown: gRNA target site sequence
ccgccatactacctgggcat

SEQ ID NO: 62 - DNA, 20 bp, Unknown
  Description of Unknown: gRNA target site sequence
tactacctgggcataggcaa

SEQ ID NO: 63 - DNA, 20 bp, Unknown
  Description of Unknown: gRNA target site sequence
tgggcataggcaacggaacc

SEQ ID NO: 64 - DNA, 20 bp, Unknown
  Description of Unknown: gRNA target site sequence
ccagatttatgtaattgatc

SEQ ID NO: 65 - DNA, 20 bp, Unknown
  Description of Unknown: gRNA target site sequence
aattgatccagaaccgtgcc

SEQ ID NO: 66 - DNA, 20 bp, Unknown
  Description of Unknown: gRNA target site sequence
cagattctgacttcctcctc

SEQ ID NO: 67 - DNA, 20 bp, Unknown
  Description of Unknown: gRNA target site sequence
cttcctcctctggatccttg

SEQ ID NO: 68 - DNA, 20 bp, Unknown
  Description of Unknown: gRNA target site sequence
cctcctctggatccttgcag

SEQ ID NO: 69 - DNA, 20 bp, Unknown
  Description of Unknown: gRNA target site sequence
ctctggatccttgcagcagt

SEQ ID NO: 70 - DNA, 20 bp, Unknown
  Description of Unknown: gRNA target site sequence
gatccttgcagcagttagtt

SEQ ID NO: 71 - DNA, 20 bp, Unknown
  Description of Unknown: gRNA target site sequence
atccttgcagcagttagttc

SEQ ID NO: 72 - DNA, 20 bp, Unknown
  Description of Unknown: gRNA target site sequence
tccttgcagcagttagttcg

SEQ ID NO: 73 - DNA, 20 bp, Unknown
  Description of Unknown: gRNA target site sequence
agttcggggttgttttttta

SEQ ID NO: 74 - DNA, 20 bp, Unknown
  Description of Unknown: gRNA target site sequence
tttttatagctttctcctca

SEQ ID NO: 75 - DNA, 20 bp, Unknown
  Description of Unknown: gRNA target site sequence
ctcctcacagctgtttcttt

SEQ ID NO: 76 - DNA, 20 bp, Unknown
  Description of Unknown: gRNA target site sequence
tttctttgagcaaaatgcta

SEQ ID NO: 77 - DNA, 20 bp, Unknown
  Description of Unknown: gRNA target site sequence
ttgagcaaaatgctaaagaa

SEQ ID NO: 78 - DNA, 20 bp, Unknown
  Description of Unknown: gRNA target site sequence
agcaaaatgctaaagaaaag

SEQ ID NO: 79 - DNA, 20 bp, Unknown
  Description of Unknown: gRNA target site sequence
gaaaagaagccctcttacaa

SEQ ID NO: 80 - DNA, 20 bp, Unknown
  Description of Unknown: gRNA target site sequence
aaaagaagccctcttacaac

SEQ ID NO: 81 - DNA, 20 bp, Unknown
  Description of Unknown: gRNA target site sequence
aaagaagccctcttacaaca

SEQ ID NO: 82 - DNA, 20 bp, Unknown
  Description of Unknown: gRNA target site sequence
aagaagccctcttacaacag

SEQ ID NO: 83 - DNA, 20 bp, Unknown
  Description of Unknown: gRNA target site sequence
ctatgtgaaaatgcccccaa

SEQ ID NO: 84 - DNA, 20 bp, Unknown
  Description of Unknown: gRNA target site sequence
atgtgaaaatgcccccaaca

SEQ ID NO: 85 - DNA, 20 bp, Unknown
  Description of Unknown: gRNA target site sequence
gaaaatgcccccaacagagc

SEQ ID NO: 86 - DNA, 20 bp, Unknown
  Description of Unknown: gRNA target site sequence
caacagagccagaatgtgaa

SEQ ID NO: 87 - DNA, 20 bp, Unknown
  Description of Unknown: gRNA target site sequence
cagaatgtgaaaagcaattt

SEQ ID NO: 88 - DNA, 20 bp, Unknown
  Description of Unknown: gRNA target site sequence
tcaattgatgggaataaaat

SEQ ID NO: 89 - DNA, 20 bp, Unknown
  Description of Unknown: gRNA target site sequence
caattgatgggaataaaata

SEQ ID NO: 90 - DNA, 20 bp, Unknown
  Description of Unknown: gRNA target site sequence
tgaaattgcttttcacattc

SEQ ID NO: 91 - DNA, 20 bp, Unknown
  Description of Unknown: gRNA target site sequence
ttttcacattctggctctgt

SEQ ID NO: 92 - DNA, 20 bp, Unknown
  Description of Unknown: gRNA target site sequence
tttcacattctggctctgtt

SEQ ID NO: 93 - DNA, 20 bp, Unknown
  Description of Unknown: gRNA target site sequence
ttcacattctggctctgttg

SEQ ID NO: 94 - DNA, 20 bp, Unknown
  Description of Unknown: gRNA target site sequence
tcacattctggctctgttgg

SEQ ID NO: 95 - DNA, 20 bp, Unknown
  Description of Unknown: gRNA target site sequence
ctgttgggggcattttcaca

SEQ ID NO: 96 - DNA, 20 bp, Unknown
  Description of Unknown: gRNA target site sequence
ttcacatagacccctgttgt

SEQ ID NO: 97 - DNA, 20 bp, Unknown
  Description of Unknown: gRNA target site sequence
cacatagacccctgttgtaa

SEQ ID NO: 98 - DNA, 20 bp, Unknown
  Description of Unknown: gRNA target site sequence
acatagacccctgttgtaag

SEQ ID NO: 99 - DNA, 20 bp, Unknown
  Description of Unknown: gRNA target site sequence
catagacccctgttgtaaga

SEQ ID NO: 100 - DNA, 20 bp, Unknown
  Description of Unknown: gRNA target site sequence
gtaagagggcttcttttctt

SEQ ID NO: 101 - DNA, 20 bp, Unknown
  Description of Unknown: gRNA target site sequence
tttctttagcattttgctca

SEQ ID NO: 102 - DNA, 20 bp, Unknown
  Description of Unknown: gRNA target site sequence
tagcattttgctcaaagaaa

SEQ ID NO: 103 - DNA, 20 bp, Unknown
  Description of Unknown: gRNA target site sequence
ttgctcaaagaaacagctgt

SEQ ID NO: 104 - DNA, 20 bp, Unknown
  Description of Unknown: gRNA target site sequence
tgctcaaagaaacagctgtg

SEQ ID NO: 105 - DNA, 20 bp, Unknown
  Description of Unknown: gRNA target site sequence
ctcaaagaaacagctgtgag

SEQ ID NO: 106 - DNA, 20 bp, Unknown
  Description of Unknown: gRNA target site sequence
aagaaacagctgtgaggaga

SEQ ID NO: 107 - DNA, 20 bp, Unknown
  Description of Unknown: gRNA target site sequence
aaccccgaactaactgctgc

SEQ ID NO: 108 - DNA, 20 bp, Unknown
  Description of Unknown: gRNA target site sequence
accccgaactaactgctgca

SEQ ID NO: 109 - DNA, 20 bp, Unknown
  Description of Unknown: gRNA target site sequence
aactaactgctgcaaggatc

SEQ ID NO: 110 - DNA, 20 bp, Unknown
  Description of Unknown: gRNA target site sequence
ctaactgctgcaaggatcca

SEQ ID NO: 111 - DNA, 20 bp, Unknown
  Description of Unknown: gRNA target site sequence
taactgctgcaaggatccag

SEQ ID NO: 112 - DNA, 20 bp, Unknown
  Description of Unknown: gRNA target site sequence
actgctgcaaggatccagag

SEQ ID NO: 113 - DNA, 20 bp, Unknown
  Description of Unknown: gRNA target site sequence
ctgctgcaaggatccagagg

SEQ ID NO: 114 - DNA, 20 bp, Unknown
  Description of Unknown: gRNA target site sequence
ctgcaaggatccagaggagg

SEQ ID NO: 115 - DNA, 20 bp, Unknown
  Description of Unknown: gRNA target site sequence
aaggatccagaggaggaagt

SEQ ID NO: 116 - DNA, 20 bp, Unknown
  Description of Unknown: gRNA target site sequence
cagaggaggaagtcagaatc

SEQ ID NO: 117 - DNA, 20 bp, Unknown
  Description of Unknown: gRNA target site sequence
agaggaggaagtcagaatct

SEQ ID NO: 118 - DNA, 20 bp, Unknown
  Description of Unknown: gRNA target site sequence
aggaagtcagaatctgggca

SEQ ID NO: 119 - DNA, 20 bp, Unknown
  Description of Unknown: gRNA target site sequence
tcagaatctgggcacggttc

SEQ ID NO: 120 - DNA, 20 bp, Unknown
  Description of Unknown: gRNA target site sequence
ctggatcaattacataaatc

SEQ ID NO: 121 - DNA, 20 bp, Unknown
  Description of Unknown: gRNA target site sequence
tggatcaattacataaatct

SEQ ID NO: 122 - DNA, 20 bp, Unknown
  Description of Unknown: gRNA target site sequence
tgggttccgttgcctatgcc

SEQ ID NO: 123 - DNA, 20 bp, Unknown
  Description of Unknown: gRNA target site sequence
gggttccgttgcctatgccc

SEQ ID NO: 124 - DNA, 20 bp, Unknown
  Description of Unknown: gRNA target site sequence
ttccgttgcctatgcccagg

SEQ ID NO: 125 - DNA, 20 bp, Unknown
  Description of Unknown: gRNA target site sequence
ttgcctatgcccaggtagta

SEQ ID NO: 126 - DNA, 20 bp, Unknown
  Description of Unknown: gRNA target site sequence
cctatgcccaggtagtatgg

SEQ ID NO: 127 - DNA, 20 bp, Unknown
  Description of Unknown: gRNA target site sequence
atgcccaggtagtatggcgg

SEQ ID NO: 128 - DNA, 20 bp, Unknown
  Description of Unknown: gRNA target site sequence
tgcccaggtagtatggcggt

SEQ ID NO: 129 - DNA, 20 bp, Unknown
  Description of Unknown: gRNA target site sequence
tagtatggcggtgggtacat

SEQ ID NO: 130 - DNA, 20 bp, Unknown
  Description of Unknown: gRNA target site sequence
ggtacatgagctccaccttg

SEQ ID NO: 131 - DNA, 20 bp, Unknown
  Description of Unknown: gRNA target site sequence
tgagctccaccttgcagatg

SEQ ID NO: 132 - DNA, 20 bp, Unknown
  Description of Unknown: gRNA target site sequence
agctccaccttgcagatgta

SEQ ID NO: 133 - DNA, 20 bp, Unknown
  Description of Unknown: gRNA target site sequence
gatgtagagtcccgtgtcca

SEQ ID NO: 134 - DNA, 20 bp, Unknown
  Description of Unknown: gRNA target site sequence
agtcccgtgtccatggccct

SEQ ID NO: 135 - DNA, 20 bp, Unknown
  Description of Unknown: gRNA target site sequence
tgtccatggccctcagtcct

SEQ ID NO: 136 - DNA, 20 bp, Unknown
  Description of Unknown: gRNA target site sequence
catggccctcagtccttgga

SEQ ID NO: 137 - DNA, 20 bp, Unknown
  Description of Unknown: gRNA target site sequence
gccctcagtccttggatagt

SEQ ID NO: 138 - DNA, 20 bp, Unknown
  Description of Unknown: gRNA target site sequence
ccctcagtccttggatagtg

SEQ ID NO: 139 - DNA, 20 bp, Unknown
  Description of Unknown: gRNA target site sequence
gaggttcacttgatttccac

SEQ ID NO: 140 - DNA, 20 bp, Unknown
  Description of Unknown: gRNA target site sequence
ggttcacttgatttccactg

SEQ ID NO: 141 - DNA, 20 bp, Unknown
  Description of Unknown: gRNA target site sequence
gttcacttgatttccactgg

SEQ ID NO: 142 - DNA, 20 bp, Unknown
  Description of Unknown: gRNA target site sequence
ttccactggaggtgcccgtg

SEQ ID NO: 143 - DNA, 20 bp, Unknown
  Description of Unknown: gRNA target site sequence
actggaggtgcccgtgcaga

SEQ ID NO: 144 - DNA, 20 bp, Unknown
  Description of Unknown: gRNA target site sequence
cccgtgcagatggaatcatc

SEQ ID NO: 145 - DNA, 20 bp, Unknown
  Description of Unknown: gRNA target site sequence
ccgtgcagatggaatcatct

SEQ ID NO: 146 - DNA, 20 bp, Unknown
  Description of Unknown: gRNA target site sequence
tgcagatggaatcatctagg

SEQ ID NO: 147 - DNA, 20 bp, Unknown
  Description of Unknown: gRNA target site sequence
gcagatggaatcatctagga

SEQ ID NO: 148 - DNA, 20 bp, Unknown
  Description of Unknown: gRNA target site sequence
tcaactcattccccatcatg

SEQ ID NO: 149 - DNA, 20 bp, Unknown
  Description of Unknown: gRNA target site sequence
caactcattccccatcatgt

SEQ ID NO: 150 - DNA, 20 bp, Unknown
  Description of Unknown: gRNA target site sequence
ccatcatgtaggttgccgca

SEQ ID NO: 151 - DNA, 20 bp, Unknown
  Description of Unknown: gRNA target site sequence
gtaggttgccgcacagactt

SEQ ID NO: 152 - DNA, 20 bp, Unknown
  Description of Unknown: gRNA target site sequence
ccgcacagacttcagtcacc

SEQ ID NO: 153 - DNA, 20 bp, Unknown
  Description of Unknown: gRNA target site sequence
gacttcagtcacctggctgt

SEQ ID NO: 154 - DNA, 20 bp, Unknown
  Description of Unknown: gRNA target site sequence
acctggctgtcagcctgccg

SEQ ID NO: 155 - DNA, 20 bp, Unknown
  Description of Unknown: gRNA target site sequence
cctgccgaagcactgtcacc

SEQ ID NO: 156 - DNA, 20 bp, Unknown
  Description of Unknown: gRNA target site sequence
aagcactgtcacccggacct

SEQ ID NO: 157 - DNA, 20 bp, Unknown
  Description of Unknown: gRNA target site sequence
cactgtcacccggacctcag

SEQ ID NO: 158 - DNA, 20 bp, Unknown
  Description of Unknown: gRNA target site sequence
cggacctcagtggctttgcc

SEQ ID NO: 159 - DNA, 20 bp, Unknown
  Description of Unknown: gRNA target site sequence
gacctcagtggctttgcctg

SEQ ID NO: 160 - DNA, 20 bp, Unknown
  Description of Unknown: gRNA target site sequence
gagatgcatactcacacaca

SEQ ID NO: 161 - DNA, 20 bp, Unknown
  Description of Unknown: gRNA target site sequence
tgcatactcacacacaaagc

SEQ ID NO: 162 - DNA, 20 bp, Unknown
  Description of Unknown: gRNA target site sequence
acacaaagctggcgatgcct

SEQ ID NO: 163 - DNA, 20 bp, Unknown
  Description of Unknown: gRNA target site sequence
gctggcgatgcctcggctgc

SEQ ID NO: 164 - DNA, 20 bp, Unknown
  Description of Unknown: gRNA target site sequence
gcgatgcctcggctgctggc

SEQ ID NO: 165 - DNA, 20 bp, Unknown
  Description of Unknown: gRNA target site sequence
tcggctgctggccagtacca

SEQ ID NO: 166 - DNA, 20 bp, Unknown
  Description of Unknown: gRNA target site sequence
gctgctggccagtaccacag

SEQ ID NO: 167 - DNA, 20 bp, Unknown
  Description of Unknown: gRNA target site sequence
ctgctggccagtaccacagc

SEQ ID NO: 168 - DNA, 20 bp, Unknown
  Description of Unknown: gRNA target site sequence
tggccagtaccacagcaggc

SEQ ID NO: 169 - DNA, 20 bp, Unknown
  Description of Unknown: gRNA target site sequence
ggccagtaccacagcaggct

SEQ ID NO: 170 - DNA, 20 bp, Unknown
  Description of Unknown: gRNA target site sequence
gggccacgtgcattgctttg

SEQ ID NO: 171 - DNA, 20 bp, Unknown
  Description of Unknown: gRNA target site sequence
ccacgtgcattgctttgcag

SEQ ID NO: 172 - DNA, 20 bp, Unknown
  Description of Unknown: gRNA target site sequence
gtgcattgctttgcagaaga

SEQ ID NO: 173 - DNA, 20 bp, Unknown
  Description of Unknown: gRNA target site sequence
tgcattgctttgcagaagac

SEQ ID NO: 174 - DNA, 20 bp, Unknown
  Description of Unknown: gRNA target site sequence
gcattgctttgcagaagaca

SEQ ID NO: 175 - DNA, 20 bp, Unknown
  Description of Unknown: gRNA target site sequence
ctttgcagaagacagggatg

SEQ ID NO: 176 - DNA, 20 bp, Unknown
  Description of Unknown: gRNA target site sequence
ttgcagaagacagggatgaa

SEQ ID NO: 177 - DNA, 20 bp, Unknown
  Description of Unknown: gRNA target site sequence
cagaagacagggatgaagag

SEQ ID NO: 178 - DNA, 20 bp, Unknown
  Description of Unknown: gRNA target site sequence
gggatgaagagaagaaaaaa

SEQ ID NO: 179 - DNA, 20 bp, Unknown
  Description of Unknown: gRNA target site sequence
ggatgaagagaagaaaaaac

SEQ ID NO: 180 - DNA, 20 bp, Unknown
  Description of Unknown: gRNA target site sequence
atgaagagaagaaaaaacag

SEQ ID NO: 181 - DNA, 20 bp, Unknown
  Description of Unknown: gRNA target site sequence
gaagagaagaaaaaacagga

SEQ ID NO: 182 - DNA, 20 bp, Unknown
  Description of Unknown: gRNA target site sequence
gaagaaaaaacaggagagtg

SEQ ID NO: 183 - DNA, 20 bp, Unknown
  Description of Unknown: gRNA target site sequence
aagaaaaaacaggagagtgc

SEQ ID NO: 184 - DNA, 20 bp, Unknown
  Description of Unknown: gRNA target site sequence
agaaaaaacaggagagtgca

SEQ ID NO: 185 - DNA, 20 bp, Unknown
  Description of Unknown: gRNA target site sequence
aaaacaggagagtgcagggc

SEQ ID NO: 186 - DNA, 20 bp, Unknown
  Description of Unknown: gRNA target site sequence
aaacaggagagtgcagggcc

SEQ ID NO: 187 - DNA, 20 bp, Unknown
  Description of Unknown: gRNA target site sequence
gagagtgcagggccaggtcc

SEQ ID NO: 188 - DNA, 20 bp, Unknown
  Description of Unknown: gRNA target site sequence
agtgcagggccaggtcctgg

SEQ ID NO: 189 - DNA, 20 bp, Unknown
  Description of Unknown: gRNA target site sequence
cagggccaggtcctggtagc

SEQ ID NO: 190 - DNA, 20 bp, Unknown
  Description of Unknown: gRNA target site sequence
agggccaggtcctggtagcc

SEQ ID NO: 191 - DNA, 20 bp, Unknown
  Description of Unknown: gRNA target site sequence
caggtcctggtagccaggtt

SEQ ID NO: 192 - DNA, 20 bp, Unknown
  Description of Unknown: gRNA target site sequence
cctggtagccaggttcagct

SEQ ID NO: 193 - DNA, 20 bp, Unknown
  Description of Unknown: gRNA target site sequence
gccttgtgccgctgaaatcc

SEQ ID NO: 194 - DNA, 20 bp, Unknown
  Description of Unknown: gRNA target site sequence
ccttgtgccgctgaaatcca

SEQ ID NO: 195 - DNA, 20 bp, Unknown
  Description of Unknown: gRNA target site sequence
gtgccgctgaaatccaaggc

SEQ ID NO: 196 - DNA, 20 bp, Unknown
  Description of Unknown: gRNA target site sequence
tgcagatcccacaggcgccc

SEQ ID NO: 197 - skipped

SEQ ID NO: 198 - DNA, 20 bp, Unknown
  Description of Unknown: gRNA target site sequence
gatcccacaggcgccctggc

SEQ ID NO: 199 - DNA, 20 bp, Unknown
  Description of Unknown: gRNA target site sequence
aggcgccctggccagtcgtc

SEQ ID NO: 200 - DNA, 20 bp, Unknown
  Description of Unknown: gRNA target site sequence
ggcgccctggccagtcgtct

SEQ ID NO: 201 - DNA, 20 bp, Unknown
  Description of Unknown: gRNA target site sequence
gccctggccagtcgtctggg

SEQ ID NO: 202 - DNA, 20 bp, Unknown
  Description of Unknown: gRNA target site sequence
cgtctgggcggtgctacaac

SEQ ID NO: 203 - DNA, 20 bp, Unknown
  Description of Unknown: gRNA target site sequence
gtctgggcggtgctacaact

SEQ ID NO: 204 - DNA, 20 bp, Unknown
  Description of Unknown: gRNA target site sequence
gggcggtgctacaactgggc

SEQ ID NO: 205 - DNA, 20 bp, Unknown
  Description of Unknown: gRNA target site sequence
cggtgctacaactgggctgg

SEQ ID NO: 206 - DNA, 20 bp, Unknown
  Description of Unknown: gRNA target site sequence
gctacaactgggctggcggc

SEQ ID NO: 207 - DNA, 20 bp, Unknown
  Description of Unknown: gRNA target site sequence
ctacaactgggctggcggcc

SEQ ID NO: 208 - DNA, 20 bp, Unknown
  Description of Unknown: gRNA target site sequence
aactgggctggcggccagga

SEQ ID NO: 209 - DNA, 20 bp, Unknown
  Description of Unknown: gRNA target site sequence
ctggcggccaggatggttct

SEQ ID NO: 210 - DNA, 20 bp, Unknown
  Description of Unknown: gRNA target site sequence
aggatggttcttagactccc

SEQ ID NO: 211 - DNA, 20 bp, Unknown
  Description of Unknown: gRNA target site sequence
tggttcttagactccccaga

SEQ ID NO: 212 - DNA, 20 bp, Unknown
  Description of Unknown: gRNA target site sequence
ggttcttagactccccagac

SEQ ID NO: 213 - DNA, 20 bp, Unknown
  Description of Unknown: gRNA target site sequence
tagactccccagacaggccc

SEQ ID NO: 214 - DNA, 20 bp, Unknown
  Description of Unknown: gRNA target site sequence
gaacccccccaccttctccc

SEQ ID NO: 215 - DNA, 20 bp, Unknown
  Description of Unknown: gRNA target site sequence
cttctccccagccctgctcg

SEQ ID NO: 216 - DNA, 20 bp, Unknown
  Description of Unknown: gRNA target site sequence
agccctgctcgtggtgaccg

SEQ ID NO: 217 - DNA, 20 bp, Unknown
  Description of Unknown: gRNA target site sequence
gccctgctcgtggtgaccga

SEQ ID NO: 218 - DNA, 20 bp, Unknown
  Description of Unknown: gRNA target site sequence
ccctgctcgtggtgaccgaa

SEQ ID NO: 219 - DNA, 20 bp, Unknown
  Description of Unknown: gRNA target site sequence
cctgctcgtggtgaccgaag

SEQ ID NO: 220 - DNA, 20 bp, Unknown
  Description of Unknown: gRNA target site sequence
gacaacgccaccttcacctg

SEQ ID NO: 221 - DNA, 20 bp, Unknown
  Description of Unknown: gRNA target site sequence
ctgcagcttctccaacacat

SEQ ID NO: 222 - DNA, 20 bp, Unknown
  Description of Unknown: gRNA target site sequence
gcagcttctccaacacatcg

SEQ ID NO: 223 - DNA, 20 bp, Unknown
  Description of Unknown: gRNA target site sequence
agcttctccaacacatcgga

SEQ ID NO: 224 - DNA, 20 bp, Unknown
  Description of Unknown: gRNA target site sequence
cggagagcttcgtgctaaac

SEQ ID NO: 225 - DNA, 20 bp, Unknown
  Description of Unknown: gRNA target site sequence
gtgctaaactggtaccgcat

SEQ ID NO: 226 - DNA, 20 bp, Unknown
  Description of Unknown: gRNA target site sequence
aactggtaccgcatgagccc

SEQ ID NO: 227 - DNA, 20 bp, Unknown
  Description of Unknown: gRNA target site sequence
accgcatgagccccagcaac

SEQ ID NO: 228 - DNA, 20 bp, Unknown
  Description of Unknown: gRNA target site sequence
catgagccccagcaaccaga

SEQ ID NO: 229 - DNA, 20 bp, Unknown
  Description of Unknown: gRNA target site sequence
gccccagcaaccagacggac

SEQ ID NO: 230 - DNA, 20 bp, Unknown
  Description of Unknown: gRNA target site sequence
cagcaaccagacggacaagc

SEQ ID NO: 231 - DNA, 20 bp, Unknown
  Description of Unknown: gRNA target site sequence
acaagctggccgccttcccc

SEQ ID NO: 232 - DNA, 20 bp, Unknown
  Description of Unknown: gRNA target site sequence
caagctggccgccttccccg

SEQ ID NO: 233 - DNA, 20 bp, Unknown
  Description of Unknown: gRNA target site sequence
gccgccttccccgaggaccg

SEQ ID NO: 234 - DNA, 20 bp, Unknown
  Description of Unknown: gRNA target site sequence
ccttccccgaggaccgcagc

SEQ ID NO: 235 - DNA, 20 bp, Unknown
  Description of Unknown: gRNA target site sequence
cccgaggaccgcagccagcc

SEQ ID NO: 236 - DNA, 20 bp, Unknown
  Description of Unknown: gRNA target site sequence
aggaccgcagccagcccggc

SEQ ID NO: 237 - DNA, 20 bp, Unknown
  Description of Unknown: gRNA target site sequence
ggaccgcagccagcccggcc

SEQ ID NO: 238 - DNA, 20 bp, Unknown
  Description of Unknown: gRNA target site sequence
cgtgtcacacaactgcccaa

SEQ ID NO: 239 - DNA, 20 bp, Unknown
  Description of Unknown: gRNA target site sequence
gtgtcacacaactgcccaac

SEQ ID NO: 240 - DNA, 20 bp, Unknown
  Description of Unknown: gRNA target site sequence
aacgggcgtgacttccacat

SEQ ID NO: 241 - DNA, 20 bp, Unknown
  Description of Unknown: gRNA target site sequence
gcgtgacttccacatgagcg

SEQ ID NO: 242 - DNA, 20 bp, Unknown
  Description of Unknown: gRNA target site sequence
gacttccacatgagcgtggt

SEQ ID NO: 243 - DNA, 20 bp, Unknown
  Description of Unknown: gRNA target site sequence
acttccacatgagcgtggtc

SEQ ID NO: 244 - DNA, 20 bp, Unknown
  Description of Unknown: gRNA target site sequence
cttccacatgagcgtggtca

SEQ ID NO: 245 - DNA, 20 bp, Unknown
  Description of Unknown: gRNA target site sequence
acatgagcgtggtcagggcc

SEQ ID NO: 246 - DNA, 20 bp, Unknown
  Description of Unknown: gRNA target site sequence
gtcagggcccggcgcaatga

SEQ ID NO: 247 - DNA, 20 bp, Unknown
  Description of Unknown: gRNA target site sequence
agggcccggcgcaatgacag

SEQ ID NO: 248 - DNA, 20 bp, Unknown
  Description of Unknown: gRNA target site sequence
gacagcggcacctacctctg

SEQ ID NO: 249 - DNA, 20 bp, Unknown
  Description of Unknown: gRNA target site sequence
acagcggcacctacctctgt

SEQ ID NO: 250 - DNA, 20 bp, Unknown
  Description of Unknown: gRNA target site sequence
cagcggcacctacctctgtg

SEQ ID NO: 251 - DNA, 20 bp, Unknown
  Description of Unknown: gRNA target site sequence
cctctgtggggccatctccc

SEQ ID NO: 252 - DNA, 20 bp, Unknown
  Description of Unknown: gRNA target site sequence
gggccatctccctggccccc

SEQ ID NO: 253 - DNA, 20 bp, Unknown
  Description of Unknown: gRNA target site sequence
ggccatctccctggccccca

SEQ ID NO: 254 - DNA, 20 bp, Unknown
  Description of Unknown: gRNA target site sequence
tctccctggcccccaaggcg

SEQ ID NO: 255 - DNA, 20 bp, Unknown
  Description of Unknown: gRNA target site sequence
ggcccccaaggcgcagatca

SEQ ID NO: 256 - DNA, 20 bp, Unknown
  Description of Unknown: gRNA target site sequence
cccccaaggcgcagatcaaa

SEQ ID NO: 257 - DNA, 20 bp, Unknown
  Description of Unknown: gRNA target site sequence
cccaaggcgcagatcaaaga

SEQ ID NO: 258 - DNA, 20 bp, Unknown
  Description of Unknown: gRNA target site sequence
cgcagatcaaagagagcctg

SEQ ID NO: 259 - DNA, 20 bp, Unknown
  Description of Unknown: gRNA target site sequence
gcagatcaaagagagcctgc

SEQ ID NO: 260 - DNA, 20 bp, Unknown
  Description of Unknown: gRNA target site sequence
gatcaaagagagcctgcggg

SEQ ID NO: 261 - DNA, 20 bp, Unknown
  Description of Unknown: gRNA target site sequence
tcaaagagagcctgcgggca

SEQ ID NO: 262 - DNA, 20 bp, Unknown
  Description of Unknown: gRNA target site sequence
gagagcctgcgggcagagct

SEQ ID NO: 263 - DNA, 20 bp, Unknown
  Description of Unknown: gRNA target site sequence
agagcctgcgggcagagctc

SEQ ID NO: 264 - DNA, 20 bp, Unknown
  Description of Unknown: gRNA target site sequence
gagcctgcgggcagagctca

SEQ ID NO: 265 - DNA, 20 bp, Unknown
  Description of Unknown: gRNA target site sequence
gcgggcagagctcagggtga

SEQ ID NO: 266 - DNA, 20 bp, Unknown
  Description of Unknown: gRNA target site sequence
gggcagagctcagggtgaca

SEQ ID NO: 267 - DNA, 20 bp, Unknown
  Description of Unknown: gRNA target site sequence
gcagagctcagggtgacaga

SEQ ID NO: 268 - DNA, 20 bp, Unknown
  Description of Unknown: gRNA target site sequence
gagctcagggtgacagagag

SEQ ID NO: 269 - DNA, 20 bp, Unknown
  Description of Unknown: gRNA target site sequence
agctcagggtgacagagaga

SEQ ID NO: 270 - DNA, 20 bp, Unknown
  Description of Unknown: gRNA target site sequence
gctcagggtgacagagagaa

SEQ ID NO: 271 - DNA, 20 bp, Unknown
  Description of Unknown: gRNA target site sequence
cagggtgacagagagaaggg

SEQ ID NO: 272 - DNA, 20 bp, Unknown
  Description of Unknown: gRNA target site sequence
ggtgacagagagaagggcag

SEQ ID NO: 273 - DNA, 20 bp, Unknown
  Description of Unknown: gRNA target site sequence
gagaagggcagaagtgccca

SEQ ID NO: 274 - DNA, 20 bp, Unknown
  Description of Unknown: gRNA target site sequence
gaagtgcccacagcccaccc

SEQ ID NO: 275 - DNA, 20 bp, Unknown
  Description of Unknown: gRNA target site sequence
gcccaccccagcccctcacc

SEQ ID NO: 276 - DNA, 20 bp, Unknown
  Description of Unknown: gRNA target site sequence
cccaccccagcccctcaccc

SEQ ID NO: 277 - DNA, 20 bp, Unknown
  Description of Unknown: gRNA target site sequence
ccccagcccctcacccaggc

SEQ ID NO: 278 - DNA, 20 bp, Unknown
  Description of Unknown: gRNA target site sequence
agcccctcacccaggccagc

SEQ ID NO: 279 - DNA, 20 bp, Unknown
  Description of Unknown: gRNA target site sequence
cctcacccaggccagccggc

SEQ ID NO: 280 - DNA, 20 bp, Unknown
  Description of Unknown: gRNA target site sequence
agccggccagttccaaaccc

SEQ ID NO: 281 - DNA, 20 bp, Unknown
  Description of Unknown: gRNA target site sequence
cggccagttccaaaccctgg

SEQ ID NO: 282 - DNA, 20 bp, Unknown
  Description of Unknown: gRNA target site sequence
cagttccaaaccctggtggt

SEQ ID NO: 283 - DNA, 20 bp, Unknown
  Description of Unknown: gRNA target site sequence
aaccctggtggttggtgtcg

SEQ ID NO: 284 - DNA, 20 bp, Unknown
  Description of Unknown: gRNA target site sequence
accctggtggttggtgtcgt

SEQ ID NO: 285 - DNA, 20 bp, Unknown
  Description of Unknown: gRNA target site sequence
ctggtggttggtgtcgtggg

SEQ ID NO: 286 - DNA, 20 bp, Unknown
  Description of Unknown: gRNA target site sequence
tggtgtcgtgggcggcctgc

SEQ ID NO: 287 - DNA, 20 bp, Unknown
  Description of Unknown: gRNA target site sequence
ggtgtcgtgggcggcctgct

SEQ ID NO: 288 - DNA, 20 bp, Unknown
  Description of Unknown: gRNA target site sequence
gtcgtgggcggcctgctggg

SEQ ID NO: 289 - DNA, 20 bp, Unknown
  Description of Unknown: gRNA target site sequence
gggcggcctgctgggcagcc

SEQ ID NO: 290 - DNA, 20 bp, Unknown
  Description of Unknown: gRNA target site sequence
gctgggcagcctggtgctgc

SEQ ID NO: 291 - DNA, 20 bp, Unknown
  Description of Unknown: gRNA target site sequence
gcagcctggtgctgctagtc

SEQ ID NO: 292 - DNA, 20 bp, Unknown
  Description of Unknown: gRNA target site sequence
cagcctggtgctgctagtct

SEQ ID NO: 293 - DNA, 20 bp, Unknown
  Description of Unknown: gRNA target site sequence
ggtgctgctagtctgggtcc

SEQ ID NO: 294 - DNA, 20 bp, Unknown
  Description of Unknown: gRNA target site sequence
tcctggccgtcatctgctcc

SEQ ID NO: 295 - DNA, 20 bp, Unknown
  Description of Unknown: gRNA target site sequence
cctggccgtcatctgctccc

SEQ ID NO: 296 - DNA, 20 bp, Unknown
  Description of Unknown: gRNA target site sequence
catctgctcccgggccgcac

SEQ ID NO: 297 - DNA, 20 bp, Unknown
  Description of Unknown: gRNA target site sequence
atctgctcccgggccgcacg

SEQ ID NO: 298 - DNA, 20 bp, Unknown
  Description of Unknown: gRNA target site sequence
tctgctcccgggccgcacga

SEQ ID NO: 299 - DNA, 20 bp, Unknown
  Description of Unknown: gRNA target site sequence
ccgggccgcacgagggacaa

SEQ ID NO: 300 - DNA, 20 bp, Unknown
  Description of Unknown: gRNA target site sequence
cgggccgcacgagggacaat

SEQ ID NO: 301 - DNA, 20 bp, Unknown
  Description of Unknown: gRNA target site sequence
ggccgcacgagggacaatag

SEQ ID NO: 302 - DNA, 20 bp, Unknown
  Description of Unknown: gRNA target site sequence
gcacgagggacaataggagc

SEQ ID NO: 303 - DNA, 20 bp, Unknown
  Description of Unknown: gRNA target site sequence
cacgagggacaataggagcc

SEQ ID NO: 304 - DNA, 20 bp, Unknown
  Description of Unknown: gRNA target site sequence
acaataggagccaggcgcac

SEQ ID NO: 305 - DNA, 20 bp, Unknown
  Description of Unknown: gRNA target site sequence
taggagccaggcgcaccggc

SEQ ID NO: 306 - DNA, 20 bp, Unknown
  Description of Unknown: gRNA target site sequence
ggcgcaccggccagcccctg

SEQ ID NO: 307 - DNA, 20 bp, Unknown
  Description of Unknown: gRNA target site sequence
gcgcaccggccagcccctga

SEQ ID NO: 308 - DNA, 20 bp, Unknown
  Description of Unknown: gRNA target site sequence
gcaccggccagcccctgaag

SEQ ID NO: 309 - DNA, 20 bp, Unknown
  Description of Unknown: gRNA target site sequence
caccggccagcccctgaagg

SEQ ID NO: 310 - DNA, 20 bp, Unknown
  Description of Unknown: gRNA target site sequence
gcccctgaaggaggacccct

SEQ ID NO: 311 - DNA, 20 bp, Unknown
  Description of Unknown: gRNA target site sequence
agccgtgcctgtgttctctg

SEQ ID NO: 312 - DNA, 20 bp, Unknown
  Description of Unknown: gRNA target site sequence
cctgtgttctctgtggacta

SEQ ID NO: 313 - DNA, 20 bp, Unknown
  Description of Unknown: gRNA target site sequence
ctgtgttctctgtggactat

SEQ ID NO: 314 - DNA, 20 bp, Unknown
  Description of Unknown: gRNA target site sequence
tgtgttctctgtggactatg

SEQ ID NO: 315 - DNA, 20 bp, Unknown
  Description of Unknown: gRNA target site sequence
tgttctctgtggactatggg

SEQ ID NO: 316 - DNA, 20 bp, Unknown
  Description of Unknown: gRNA target site sequence
ctctgtggactatggggagc

SEQ ID NO: 317 - DNA, 20 bp, Unknown
  Description of Unknown: gRNA target site sequence
actatggggagctggatttc

SEQ ID NO: 318 - DNA, 20 bp, Unknown
  Description of Unknown: gRNA target site sequence
atggggagctggatttccag

SEQ ID NO: 319 - DNA, 20 bp, Unknown
  Description of Unknown: gRNA target site sequence
ggagctggatttccagtggc

SEQ ID NO: 320 - DNA, 20 bp, Unknown
  Description of Unknown: gRNA target site sequence
agctggatttccagtggcga

SEQ ID NO: 321 - DNA, 20 bp, Unknown
  Description of Unknown: gRNA target site sequence
tggatttccagtggcgagag

SEQ ID NO: 322 - DNA, 20 bp, Unknown
  Description of Unknown: gRNA target site sequence
ccagtggcgagagaagaccc

SEQ ID NO: 323 - DNA, 20 bp, Unknown
  Description of Unknown: gRNA target site sequence
agtggcgagagaagaccccg

SEQ ID NO: 324 - DNA, 20 bp, Unknown
  Description of Unknown: gRNA target site sequence
cccccgtgccctgtgtccct

SEQ ID NO: 325 - DNA, 20 bp, Unknown
  Description of Unknown: gRNA target site sequence
ccgtgccctgtgtccctgag

SEQ ID NO: 326 - DNA, 20 bp, Unknown
  Description of Unknown: gRNA target site sequence
gccctgtgtccctgagcaga

SEQ ID NO: 327 - DNA, 20 bp, Unknown
  Description of Unknown: gRNA target site sequence
cctgtgtccctgagcagacg

SEQ ID NO: 328 - DNA, 20 bp, Unknown
  Description of Unknown: gRNA target site sequence
tatgccaccattgtctttcc

SEQ ID NO: 329 - DNA, 20 bp, Unknown
  Description of Unknown: gRNA target site sequence
gccaccattgtctttcctag

SEQ ID NO: 330 - DNA, 20 bp, Unknown
  Description of Unknown: gRNA target site sequence
cattgtctttcctagcggaa

SEQ ID NO: 331 - DNA, 20 bp, Unknown
  Description of Unknown: gRNA target site sequence
attgtctttcctagcggaat

SEQ ID NO: 332 - DNA, 20 bp, Unknown
  Description of Unknown: gRNA target site sequence
ggcacctcatcccccgcccg

SEQ ID NO: 333 - DNA, 20 bp, Unknown
  Description of Unknown: gRNA target site sequence
gcacctcatcccccgcccgc

SEQ ID NO: 334 - DNA, 20 bp, Unknown
  Description of Unknown: gRNA target site sequence
cacctcatcccccgcccgca

SEQ ID NO: 335 - DNA, 20 bp, Unknown
  Description of Unknown: gRNA target site sequence
acctcatcccccgcccgcag

SEQ ID NO: 336 - DNA, 20 bp, Unknown
  Description of Unknown: gRNA target site sequence
atcccccgcccgcaggggct

SEQ ID NO: 337 - DNA, 20 bp, Unknown
  Description of Unknown: gRNA target site sequence
gcccgcaggggctcagctga

SEQ ID NO: 338 - DNA, 20 bp, Unknown
  Description of Unknown: gRNA target site sequence
ggggctcagctgacggccct

SEQ ID NO: 339 - DNA, 20 bp, Unknown
  Description of Unknown: gRNA target site sequence
ggctcagctgacggccctcg

SEQ ID NO: 340 - DNA, 20 bp, Unknown
  Description of Unknown: gRNA target site sequence
ctgacggccctcggagtgcc

SEQ ID NO: 341 - DNA, 20 bp, Unknown
  Description of Unknown: gRNA target site sequence
cctcggagtgcccagccact

SEQ ID NO: 342 - DNA, 20 bp, Unknown
  Description of Unknown: gRNA target site sequence
ctcggagtgcccagccactg

SEQ ID NO: 343 - DNA, 20 bp, Unknown
  Description of Unknown: gRNA target site sequence
gtgcccagccactgaggcct

SEQ ID NO: 344 - DNA, 20 bp, Unknown
  Description of Unknown: gRNA target site sequence
tgcccagccactgaggcctg

SEQ ID NO: 345 - DNA, 20 bp, Unknown
  Description of Unknown: gRNA target site sequence
cagccactgaggcctgagga

SEQ ID NO: 346 - DNA, 20 bp, Unknown
  Description of Unknown: gRNA target site sequence
ctgaggatggacactgctct

SEQ ID NO: 347 - DNA, 20 bp, Unknown
  Description of Unknown: gRNA target site sequence
ccaagagcagtgtccatcct

SEQ ID NO: 348 - DNA, 20 bp, Unknown
  Description of Unknown: gRNA target site sequence
caagagcagtgtccatcctc

SEQ ID NO: 349 - DNA, 20 bp, Unknown
  Description of Unknown: gRNA target site sequence
cagtgtccatcctcaggcct

SEQ ID NO: 350 - DNA, 20 bp, Unknown
  Description of Unknown: gRNA target site sequence
tgtccatcctcaggcctcag

SEQ ID NO: 351 - DNA, 20 bp, Unknown
  Description of Unknown: gRNA target site sequence
catcctcaggcctcagtggc

SEQ ID NO: 352 - DNA, 20 bp, Unknown
  Description of Unknown: gRNA target site sequence
atcctcaggcctcagtggct

SEQ ID NO: 353 - DNA, 20 bp, Unknown
  Description of Unknown: gRNA target site sequence
cctcagtggctgggcactcc

SEQ ID NO: 354 - DNA, 20 bp, Unknown
  Description of Unknown: gRNA target site sequence
ctcagtggctgggcactccg

SEQ ID NO: 355 - DNA, 20 bp, Unknown
  Description of Unknown: gRNA target site sequence
tcagtggctgggcactccga

SEQ ID NO: 356 - DNA, 20 bp, Unknown
  Description of Unknown: gRNA target site sequence
ctgggcactccgagggccgt

SEQ ID NO: 357 - DNA, 20 bp, Unknown
  Description of Unknown: gRNA target site sequence
cactccgagggccgtcagct

SEQ ID NO: 358 - DNA, 20 bp, Unknown
  Description of Unknown: gRNA target site sequence
ggccgtcagctgagcccctg

SEQ ID NO: 359 - DNA, 20 bp, Unknown
  Description of Unknown: gRNA target site sequence
gccgtcagctgagcccctgc

SEQ ID NO: 360 - DNA, 20 bp, Unknown
  Description of Unknown: gRNA target site sequence
gtcagctgagcccctgcggg

SEQ ID NO: 361 - DNA, 20 bp, Unknown
  Description of Unknown: gRNA target site sequence
tcagctgagcccctgcgggc

SEQ ID NO: 362 - DNA, 20 bp, Unknown
  Description of Unknown: gRNA target site sequence
cagctgagcccctgcgggcg

SEQ ID NO: 363 - DNA, 20 bp, Unknown
  Description of Unknown: gRNA target site sequence
agctgagcccctgcgggcgg

SEQ ID NO: 364 - DNA, 20 bp, Unknown
  Description of Unknown: gRNA target site sequence
agcccctgcgggcgggggat

SEQ ID NO: 365 - DNA, 20 bp, Unknown
  Description of Unknown: gRNA target site sequence
gcccctgcgggcgggggatg

SEQ ID NO: 366 - DNA, 20 bp, Unknown
  Description of Unknown: gRNA target site sequence
ggatgaggtgcccattccgc

SEQ ID NO: 367 - DNA, 20 bp, Unknown
  Description of Unknown: gRNA target site sequence
gatgaggtgcccattccgct

SEQ ID NO: 368 - DNA, 20 bp, Unknown
  Description of Unknown: gRNA target site sequence
aggtgcccattccgctagga

SEQ ID NO: 369 - DNA, 20 bp, Unknown
  Description of Unknown: gRNA target site sequence
cattccgctaggaaagacaa

SEQ ID NO: 370 - DNA, 20 bp, Unknown
  Description of Unknown: gRNA target site sequence
tccgctaggaaagacaatgg

SEQ ID NO: 371 - DNA, 20 bp, Unknown
  Description of Unknown: gRNA target site sequence
ggtggcatactccgtctgct

SEQ ID NO: 372 - DNA, 20 bp, Unknown
  Description of Unknown: gRNA target site sequence
gtggcatactccgtctgctc

SEQ ID NO: 373 - DNA, 20 bp, Unknown
  Description of Unknown: gRNA target site sequence
tggcatactccgtctgctca

SEQ ID NO: 374 - DNA, 20 bp, Unknown
  Description of Unknown: gRNA target site sequence
actccgtctgctcagggaca

SEQ ID NO: 375 - DNA, 20 bp, Unknown
  Description of Unknown: gRNA target site sequence
ctccgtctgctcagggacac

SEQ ID NO: 376 - DNA, 20 bp, Unknown
  Description of Unknown: gRNA target site sequence
tccgtctgctcagggacaca

SEQ ID NO: 377 - DNA, 20 bp, Unknown
  Description of Unknown: gRNA target site sequence
ctgctcagggacacagggca

SEQ ID NO: 378 - DNA, 20 bp, Unknown
  Description of Unknown: gRNA target site sequence
tgctcagggacacagggcac

SEQ ID NO: 379 - DNA, 20 bp, Unknown
  Description of Unknown: gRNA target site sequence
gctcagggacacagggcacg

SEQ ID NO: 380 - DNA, 20 bp, Unknown
  Description of Unknown: gRNA target site sequence
ctcagggacacagggcacgg

SEQ ID NO: 381 - DNA, 20 bp, Unknown
  Description of Unknown: gRNA target site sequence
tcagggacacagggcacggg

SEQ ID NO: 382 - DNA, 20 bp, Unknown
  Description of Unknown: gRNA target site sequence
acacagggcacggggggctc

SEQ ID NO: 383 - DNA, 20 bp, Unknown
  Description of Unknown: gRNA target site sequence
cacagggcacggggggctcc

SEQ ID NO: 384 - DNA, 20 bp, Unknown
  Description of Unknown: gRNA target site sequence
acagggcacggggggctccg

SEQ ID NO: 385 - DNA, 20 bp, Unknown
  Description of Unknown: gRNA target site sequence
ccggggtcttctctcgccac

SEQ ID NO: 386 - DNA, 20 bp, Unknown
  Description of Unknown: gRNA target site sequence
ttctctcgccactggaaatc

SEQ ID NO: 387 - DNA, 20 bp, Unknown
  Description of Unknown: gRNA target site sequence
actggaaatccagctcccca

SEQ ID NO: 388 - DNA, 20 bp, Unknown
  Description of Unknown: gRNA target site sequence
atccagctccccatagtcca

SEQ ID NO: 389 - DNA, 20 bp, Unknown
  Description of Unknown: gRNA target site sequence
ccagctccccatagtccaca

SEQ ID NO: 390 - DNA, 20 bp, Unknown
  Description of Unknown: gRNA target site sequence
cccatagtccacagagaaca

SEQ ID NO: 391 - DNA, 20 bp, Unknown
  Description of Unknown: gRNA target site sequence
ccatagtccacagagaacac

SEQ ID NO: 392 - DNA, 20 bp, Unknown
  Description of Unknown: gRNA target site sequence
gtccacagagaacacaggca

SEQ ID NO: 393 - DNA, 20 bp, Unknown
  Description of Unknown: gRNA target site sequence
cagagaacacaggcacggct

SEQ ID NO: 394 - DNA, 20 bp, Unknown
  Description of Unknown: gRNA target site sequence
agagaacacaggcacggctg

SEQ ID NO: 395 - DNA, 20 bp, Unknown
  Description of Unknown: gRNA target site sequence
gagaacacaggcacggctga

SEQ ID NO: 396 - DNA, 20 bp, Unknown
  Description of Unknown: gRNA target site sequence
agaacacaggcacggctgag

SEQ ID NO: 397 - DNA, 20 bp, Unknown
  Description of Unknown: gRNA target site sequence
acggctgaggggtcctcctt

SEQ ID NO: 398 - DNA, 20 bp, Unknown
  Description of Unknown: gRNA target site sequence
cggctgaggggtcctccttc

SEQ ID NO: 399 - DNA, 20 bp, Unknown
  Description of Unknown: gRNA target site sequence
ggctgaggggtcctccttca

SEQ ID NO: 400 - DNA, 20 bp, Unknown
  Description of Unknown: gRNA target site sequence
gctgaggggtcctccttcag

SEQ ID NO: 401 - DNA, 20 bp, Unknown
  Description of Unknown: gRNA target site sequence
aggggtcctccttcaggggc

SEQ ID NO: 402 - DNA, 20 bp, Unknown
  Description of Unknown: gRNA target site sequence
gtcctccttcaggggctggc

SEQ ID NO: 403 - DNA, 20 bp, Unknown
  Description of Unknown: gRNA target site sequence
caggggctggccggtgcgcc

SEQ ID NO: 404 - DNA, 20 bp, Unknown
  Description of Unknown: gRNA target site sequence
ggctcctattgtccctcgtg

SEQ ID NO: 405 - DNA, 20 bp, Unknown
  Description of Unknown: gRNA target site sequence
ctattgtccctcgtgcggcc

SEQ ID NO: 406 - DNA, 20 bp, Unknown
  Description of Unknown: gRNA target site sequence
tattgtccctcgtgcggccc

SEQ ID NO: 407 - DNA, 20 bp, Unknown
  Description of Unknown: gRNA target site sequence
ttgtccctcgtgcggcccgg

SEQ ID NO: 408 - DNA, 20 bp, Unknown
  Description of Unknown: gRNA target site sequence
tccctcgtgcggcccgggag

SEQ ID NO: 409 - DNA, 20 bp, Unknown
  Description of Unknown: gRNA target site sequence
tgcggcccgggagcagatga

SEQ ID NO: 410 - DNA, 20 bp, Unknown
  Description of Unknown: gRNA target site sequence
gcccgggagcagatgacggc

SEQ ID NO: 411 - DNA, 20 bp, Unknown
  Description of Unknown: gRNA target site sequence
cccgggagcagatgacggcc

SEQ ID NO: 412 - DNA, 20 bp, Unknown
  Description of Unknown: gRNA target site sequence
agcagatgacggccaggacc

SEQ ID NO: 413 - DNA, 20 bp, Unknown
  Description of Unknown: gRNA target site sequence
atgacggccaggacccagac

SEQ ID NO: 414 - DNA, 20 bp, Unknown
  Description of Unknown: gRNA target site sequence
acggccaggacccagactag

SEQ ID NO: 415 - DNA, 20 bp, Unknown
  Description of Unknown: gRNA target site sequence
aggacccagactagcagcac

SEQ ID NO: 416 - DNA, 20 bp, Unknown
  Description of Unknown: gRNA target site sequence
ggacccagactagcagcacc

SEQ ID NO: 417 - DNA, 20 bp, Unknown
  Description of Unknown: gRNA target site sequence
actagcagcaccaggctgcc

SEQ ID NO: 418 - DNA, 20 bp, Unknown
  Description of Unknown: gRNA target site sequence
agcagcaccaggctgcccag

SEQ ID NO: 419 - DNA, 20 bp, Unknown
  Description of Unknown: gRNA target site sequence
gcagcaccaggctgcccagc

SEQ ID NO: 420 - DNA, 20 bp, Unknown
  Description of Unknown: gRNA target site sequence
ccgcccacgacaccaaccac

SEQ ID NO: 421 - DNA, 20 bp, Unknown
  Description of Unknown: gRNA target site sequence
cgcccacgacaccaaccacc

SEQ ID NO: 422 - DNA, 20 bp, Unknown
  Description of Unknown: gRNA target site sequence
gcccacgacaccaaccacca

SEQ ID NO: 423 - DNA, 20 bp, Unknown
  Description of Unknown: gRNA target site sequence
cgacaccaaccaccagggtt

SEQ ID NO: 424 - DNA, 20 bp, Unknown
  Description of Unknown: gRNA target site sequence
caaccaccagggtttggaac

SEQ ID NO: 425 - DNA, 20 bp, Unknown
  Description of Unknown: gRNA target site sequence
caccagggtttggaactggc

SEQ ID NO: 426 - DNA, 20 bp, Unknown
  Description of Unknown: gRNA target site sequence
agggtttggaactggccggc

SEQ ID NO: 427 - DNA, 20 bp, Unknown
  Description of Unknown: gRNA target site sequence
ttggaactggccggctggcc

SEQ ID NO: 428 - DNA, 20 bp, Unknown
  Description of Unknown: gRNA target site sequence
tggaactggccggctggcct

SEQ ID NO: 429 - DNA, 20 bp, Unknown
  Description of Unknown: gRNA target site sequence
actggccggctggcctgggt

SEQ ID NO: 430 - DNA, 20 bp, Unknown
  Description of Unknown: gRNA target site sequence
ctggccggctggcctgggtg

SEQ ID NO: 431 - DNA, 20 bp, Unknown
  Description of Unknown: gRNA target site sequence
tggccggctggcctgggtga

SEQ ID NO: 432 - DNA, 20 bp, Unknown
  Description of Unknown: gRNA target site sequence
ggccggctggcctgggtgag

SEQ ID NO: 433 - DNA, 20 bp, Unknown
  Description of Unknown: gRNA target site sequence
ggctggcctgggtgaggggc

SEQ ID NO: 434 - DNA, 20 bp, Unknown
  Description of Unknown: gRNA target site sequence
gctggcctgggtgaggggct

SEQ ID NO: 435 - DNA, 20 bp, Unknown
  Description of Unknown: gRNA target site sequence
ctggcctgggtgaggggctg

SEQ ID NO: 436 - DNA, 20 bp, Unknown
  Description of Unknown: gRNA target site sequence
gcctgggtgaggggctgggg

SEQ ID NO: 437 - DNA, 20 bp, Unknown
  Description of Unknown: gRNA target site sequence
cctgggtgaggggctggggt

SEQ ID NO: 438 - DNA, 20 bp, Unknown
  Description of Unknown: gRNA target site sequence
tgaggggctggggtgggctg

SEQ ID NO: 439 - DNA, 20 bp, Unknown
  Description of Unknown: gRNA target site sequence
gaggggctggggtgggctgt

SEQ ID NO: 440 - DNA, 20 bp, Unknown
  Description of Unknown: gRNA target site sequence
gcccttctctctgtcaccct

SEQ ID NO: 441 - DNA, 20 bp, Unknown
  Description of Unknown: gRNA target site sequence
gtcaccctgagctctgcccg

SEQ ID NO: 442 - DNA, 20 bp, Unknown
  Description of Unknown: gRNA target site sequence
tcaccctgagctctgcccgc

SEQ ID NO: 443 - DNA, 20 bp, Unknown
  Description of Unknown: gRNA target site sequence
gctctctttgatctgcgcct

SEQ ID NO: 444 - DNA, 20 bp, Unknown
  Description of Unknown: gRNA target site sequence
ctctctttgatctgcgcctt

SEQ ID NO: 445 - DNA, 20 bp, Unknown
  Description of Unknown: gRNA target site sequence
tctctttgatctgcgccttg

SEQ ID NO: 446 - DNA, 20 bp, Unknown
  Description of Unknown: gRNA target site sequence
ctctttgatctgcgccttgg

SEQ ID NO: 447 - DNA, 20 bp, Unknown
  Description of Unknown: gRNA target site sequence
ttgatctgcgccttgggggc

SEQ ID NO: 448 - DNA, 20 bp, Unknown
  Description of Unknown: gRNA target site sequence
tgatctgcgccttgggggcc

SEQ ID NO: 449 - DNA, 20 bp, Unknown
  Description of Unknown: gRNA target site sequence
gatctgcgccttgggggcca

SEQ ID NO: 450 - DNA, 20 bp, Unknown
  Description of Unknown: gRNA target site sequence
tctgcgccttgggggccagg

SEQ ID NO: 451 - DNA, 20 bp, Unknown
  Description of Unknown: gRNA target site sequence
cgccttgggggccagggaga

SEQ ID NO: 452 - DNA, 20 bp, Unknown
  Description of Unknown: gRNA target site sequence
gggccagggagatggcccca

SEQ ID NO: 453 - DNA, 20 bp, Unknown
  Description of Unknown: gRNA target site sequence
gccagggagatggccccaca

SEQ ID NO: 454 - DNA, 20 bp, Unknown
  Description of Unknown: gRNA target site sequence
ccagggagatggccccacag

SEQ ID NO: 455 - DNA, 20 bp, Unknown
  Description of Unknown: gRNA target site sequence
gggagatggccccacagagg

SEQ ID NO: 456 - DNA, 20 bp, Unknown
  Description of Unknown: gRNA target site sequence
ggagatggccccacagaggt

SEQ ID NO: 457 - DNA, 20 bp, Unknown
  Description of Unknown: gRNA target site sequence
aggtgccgctgtcattgcgc

SEQ ID NO: 458 - DNA, 20 bp, Unknown
  Description of Unknown: gRNA target site sequence
ggtgccgctgtcattgcgcc

SEQ ID NO: 459 - DNA, 20 bp, Unknown
  Description of Unknown: gRNA target site sequence
gggccctgaccacgctcatg

SEQ ID NO: 460 - DNA, 20 bp, Unknown
  Description of Unknown: gRNA target site sequence
ccctgaccacgctcatgtgg

SEQ ID NO: 461 - DNA, 20 bp, Unknown
  Description of Unknown: gRNA target site sequence
catgtggaagtcacgcccgt

SEQ ID NO: 462 - DNA, 20 bp, Unknown
  Description of Unknown: gRNA target site sequence
atgtggaagtcacgcccgtt

SEQ ID NO: 463 - DNA, 20 bp, Unknown
  Description of Unknown: gRNA target site sequence
tggaagtcacgcccgttggg

SEQ ID NO: 464 - DNA, 20 bp, Unknown
  Description of Unknown: gRNA target site sequence
cgttgggcagttgtgtgaca

SEQ ID NO: 465 - DNA, 20 bp, Unknown
  Description of Unknown: gRNA target site sequence
tgggcagttgtgtgacacgg

SEQ ID NO: 466 - DNA, 20 bp, Unknown
  Description of Unknown: gRNA target site sequence
gcagttgtgtgacacggaag

SEQ ID NO: 467 - DNA, 20 bp, Unknown
  Description of Unknown: gRNA target site sequence
gttgtgtgacacggaagcgg

SEQ ID NO: 468 - DNA, 20 bp, Unknown
  Description of Unknown: gRNA target site sequence
tgacacggaagcggcagtcc

SEQ ID NO: 469 - DNA, 20 bp, Unknown
  Description of Unknown: gRNA target site sequence
acggaagcggcagtcctggc

SEQ ID NO: 470 - DNA, 20 bp, Unknown
  Description of Unknown: gRNA target site sequence
cggaagcggcagtcctggcc

SEQ ID NO: 471 - DNA, 20 bp, Unknown
  Description of Unknown: gRNA target site sequence
agcggcagtcctggccgggc

SEQ ID NO: 472 - DNA, 20 bp, Unknown
  Description of Unknown: gRNA target site sequence
agtcctggccgggctggctg

SEQ ID NO: 473 - DNA, 20 bp, Unknown
  Description of Unknown: gRNA target site sequence
gccgggctggctgcggtcct

SEQ ID NO: 474 - DNA, 20 bp, Unknown
  Description of Unknown: gRNA target site sequence
ccgggctggctgcggtcctc

SEQ ID NO: 475 - DNA, 20 bp, Unknown
  Description of Unknown: gRNA target site sequence
cgggctggctgcggtcctcg

SEQ ID NO: 476 - DNA, 20 bp, Unknown
  Description of Unknown: gRNA target site sequence
gctggctgcggtcctcgggg

SEQ ID NO: 477 - DNA, 20 bp, Unknown
  Description of Unknown: gRNA target site sequence
ctggctgcggtcctcgggga

SEQ ID NO: 478 - DNA, 20 bp, Unknown
  Description of Unknown: gRNA target site sequence
gctgcggtcctcggggaagg

SEQ ID NO: 479 - DNA, 20 bp, Unknown
  Description of Unknown: gRNA target site sequence
cggtcctcggggaaggcggc

SEQ ID NO: 480 - DNA, 20 bp, Unknown
  Description of Unknown: gRNA target site sequence
aggcggccagcttgtccgtc

SEQ ID NO: 481 - DNA, 20 bp, Unknown
  Description of Unknown: gRNA target site sequence
cagcttgtccgtctggttgc

SEQ ID NO: 482 - DNA, 20 bp, Unknown
  Description of Unknown: gRNA target site sequence
agcttgtccgtctggttgct

SEQ ID NO: 483 - DNA, 20 bp, Unknown
  Description of Unknown: gRNA target site sequence
gcttgtccgtctggttgctg

SEQ ID NO: 484 - DNA, 20 bp, Unknown
  Description of Unknown: gRNA target site sequence
tctggttgctggggctcatg

SEQ ID NO: 485 - DNA, 20 bp, Unknown
  Description of Unknown: gRNA target site sequence
tgctggggctcatgcggtac

SEQ ID NO: 486 - DNA, 20 bp, Unknown
  Description of Unknown: gRNA target site sequence
gggctcatgcggtaccagtt

SEQ ID NO: 487 - DNA, 20 bp, Unknown
  Description of Unknown: gRNA target site sequence
tgcggtaccagtttagcacg

SEQ ID NO: 488 - DNA, 20 bp, Unknown
  Description of Unknown: gRNA target site sequence
cacgaagctctccgatgtgt

SEQ ID NO: 489 - DNA, 20 bp, Unknown
  Description of Unknown: gRNA target site sequence
cgaagctctccgatgtgttg

SEQ ID NO: 490 - DNA, 20 bp, Unknown
  Description of Unknown: gRNA target site sequence
agctctccgatgtgttggag

SEQ ID NO: 491 - DNA, 20 bp, Unknown
  Description of Unknown: gRNA target site sequence
ccgatgtgttggagaagctg

SEQ ID NO: 492 - DNA, 20 bp, Unknown
  Description of Unknown: gRNA target site sequence
cgatgtgttggagaagctgc

SEQ ID NO: 493 - DNA, 20 bp, Unknown
  Description of Unknown: gRNA target site sequence
tgttggagaagctgcaggtg

SEQ ID NO: 494 - DNA, 20 bp, Unknown
  Description of Unknown: gRNA target site sequence
gttggagaagctgcaggtga

SEQ ID NO: 495 - DNA, 20 bp, Unknown
  Description of Unknown: gRNA target site sequence
ggagaagctgcaggtgaagg

SEQ ID NO: 496 - DNA, 20 bp, Unknown
  Description of Unknown: gRNA target site sequence
gaaggtggcgttgtcccctt

SEQ ID NO: 497 - DNA, 20 bp, Unknown
  Description of Unknown: gRNA target site sequence
ttgtccccttcggtcaccac

SEQ ID NO: 498 - DNA, 20 bp, Unknown
  Description of Unknown: gRNA target site sequence
tccccttcggtcaccacgag

SEQ ID NO: 499 - DNA, 20 bp, Unknown
  Description of Unknown: gRNA target site sequence
ccccttcggtcaccacgagc

SEQ ID NO: 500 - DNA, 20 bp, Unknown
  Description of Unknown: gRNA target site sequence
cccttcggtcaccacgagca

SEQ ID NO: 501 - DNA, 20 bp, Unknown
  Description of Unknown: gRNA target site sequence
tcggtcaccacgagcagggc

SEQ ID NO: 502 - DNA, 20 bp, Unknown
  Description of Unknown: gRNA target site sequence
cggtcaccacgagcagggct

SEQ ID NO: 503 - DNA, 20 bp, Unknown
  Description of Unknown: gRNA target site sequence
ggtcaccacgagcagggctg

SEQ ID NO: 504 - DNA, 20 bp, Unknown
  Description of Unknown: gRNA target site sequence
tcaccacgagcagggctggg

SEQ ID NO: 505 - DNA, 20 bp, Unknown
  Description of Unknown: gRNA target site sequence
ccacgagcagggctggggag

SEQ ID NO: 506 - DNA, 20 bp, Unknown
  Description of Unknown: gRNA target site sequence
cacgagcagggctggggaga

SEQ ID NO: 507 - DNA, 20 bp, Unknown
  Description of Unknown: gRNA target site sequence
gagcagggctggggagaagg

SEQ ID NO: 508 - DNA, 20 bp, Unknown
  Description of Unknown: gRNA target site sequence
agcagggctggggagaaggt

SEQ ID NO: 509 - DNA, 20 bp, Unknown
  Description of Unknown: gRNA target site sequence
gcagggctggggagaaggtg

SEQ ID NO: 510 - DNA, 20 bp, Unknown
  Description of Unknown: gRNA target site sequence
cagggctggggagaaggtgg

SEQ ID NO: 511 - DNA, 20 bp, Unknown
  Description of Unknown: gRNA target site sequence
agggctggggagaaggtggg

SEQ ID NO: 512 - DNA, 20 bp, Unknown
  Description of Unknown: gRNA target site sequence
gggctggggagaaggtgggg

SEQ ID NO: 513 - DNA, 20 bp, Unknown
  Description of Unknown: gRNA target site sequence
gggagaaggtgggggggttc

SEQ ID NO: 514 - DNA, 20 bp, Unknown
  Description of Unknown: gRNA target site sequence
ggagaaggtgggggggttcc

SEQ ID NO: 515 - DNA, 20 bp, Unknown
  Description of Unknown: gRNA target site sequence
gagaaggtgggggggttcca

SEQ ID NO: 516 - DNA, 20 bp, Unknown
  Description of Unknown: gRNA target site sequence
ggggggttccagggcctgtc

SEQ ID NO: 517 - DNA, 20 bp, Unknown
  Description of Unknown: gRNA target site sequence
gggggttccagggcctgtct

SEQ ID NO: 518 - DNA, 20 bp, Unknown
  Description of Unknown: gRNA target site sequence
ggggttccagggcctgtctg

SEQ ID NO: 519 - DNA, 20 bp, Unknown
  Description of Unknown: gRNA target site sequence
ggttccagggcctgtctggg

SEQ ID NO: 520 - DNA, 20 bp, Unknown
  Description of Unknown: gRNA target site sequence
agggcctgtctggggagtct

SEQ ID NO: 521 - DNA, 20 bp, Unknown
  Description of Unknown: gRNA target site sequence
ggggagtctaagaaccatcc

SEQ ID NO: 522 - DNA, 20 bp, Unknown
  Description of Unknown: gRNA target site sequence
ctaagaaccatcctggccgc

SEQ ID NO: 523 - DNA, 20 bp, Unknown
  Description of Unknown: gRNA target site sequence
aaccatcctggccgccagcc

SEQ ID NO: 524 - DNA, 20 bp, Unknown
  Description of Unknown: gRNA target site sequence
cctggccgccagcccagttg

SEQ ID NO: 525 - DNA, 20 bp, Unknown
  Description of Unknown: gRNA target site sequence
agcccagttgtagcaccgcc

SEQ ID NO: 526 - DNA, 20 bp, Unknown
  Description of Unknown: gRNA target site sequence
tgtagcaccgcccagacgac

SEQ ID NO: 527 - DNA, 20 bp, Unknown
  Description of Unknown: gRNA target site sequence
gcaccgcccagacgactggc

SEQ ID NO: 528 - DNA, 20 bp, Unknown
  Description of Unknown: gRNA target site sequence
caccgcccagacgactggcc

SEQ ID NO: 529 - DNA, 20 bp, Unknown
  Description of Unknown: gRNA target site sequence
accgcccagacgactggcca

SEQ ID NO: 530 - DNA, 20 bp, Unknown
  Description of Unknown: gRNA target site sequence
acgactggccagggcgcctg

SEQ ID NO: 531 - DNA, 20 bp, Unknown
  Description of Unknown: gRNA target site sequence
cgactggccagggcgcctgt

SEQ ID NO: 532 - DNA, 20 bp, Unknown
  Description of Unknown: gRNA target site sequence
cctcttgtcccacagatatc

SEQ ID NO: 533 - DNA, 20 bp, Unknown
  Description of Unknown: gRNA target site sequence
accctgaccctgccgtgtac

SEQ ID NO: 534 - DNA, 20 bp, Unknown
  Description of Unknown: gRNA target site sequence
gaccctgccgtgtaccagct

SEQ ID NO: 535 - DNA, 20 bp, Unknown
  Description of Unknown: gRNA target site sequence
ccctgccgtgtaccagctga

SEQ ID NO: 536 - DNA, 20 bp, Unknown
  Description of Unknown: gRNA target site sequence
cagctgagagactctaaatc

SEQ ID NO: 537 - DNA, 20 bp, Unknown
  Description of Unknown: gRNA target site sequence
gagactctaaatccagtgac

SEQ ID NO: 538 - DNA, 20 bp, Unknown
  Description of Unknown: gRNA target site sequence
tctcaaacaaatgtgtcaca

SEQ ID NO: 539 - DNA, 20 bp, Unknown
  Description of Unknown: gRNA target site sequence
aaacaaatgtgtcacaaagt

SEQ ID NO: 540 - DNA, 20 bp, Unknown
  Description of Unknown: gRNA target site sequence
aacaaatgtgtcacaaagta

SEQ ID NO: 541 - DNA, 20 bp, Unknown
  Description of Unknown: gRNA target site sequence
ggattctgatgtgtatatca

SEQ ID NO: 542 - DNA, 20 bp, Unknown
  Description of Unknown: gRNA target site sequence
tatcacagacaaaactgtgc

SEQ ID NO: 543 - DNA, 20 bp, Unknown
  Description of Unknown: gRNA target site sequence
gacaaaactgtgctagacat

SEQ ID NO: 544 - DNA, 20 bp, Unknown
  Description of Unknown: gRNA target site sequence
acaaaactgtgctagacatg

SEQ ID NO: 545 - DNA, 20 bp, Unknown
  Description of Unknown: gRNA target site sequence
tgtgctagacatgaggtcta

SEQ ID NO: 546 - DNA, 20 bp, Unknown
  Description of Unknown: gRNA target site sequence
acatgaggtctatggacttc

SEQ ID NO: 547 - DNA, 20 bp, Unknown
  Description of Unknown: gRNA target site sequence
atgaggtctatggacttcaa

SEQ ID NO: 548 - DNA, 20 bp, Unknown
  Description of Unknown: gRNA target site sequence
tctatggacttcaagagcaa

SEQ ID NO: 549 - DNA, 20 bp, Unknown
  Description of Unknown: gRNA target site sequence
cttcaagagcaacagtgctg

SEQ ID NO: 550 - DNA, 20 bp, Unknown
  Description of Unknown: gRNA target site sequence
agagcaacagtgctgtggcc

SEQ ID NO: 551 - DNA, 20 bp, Unknown
  Description of Unknown: gRNA target site sequence
agcaacagtgctgtggcctg

SEQ ID NO: 552 - DNA, 20 bp, Unknown
  Description of Unknown: gRNA target site sequence
tgtgcaaacgccttcaacaa

SEQ ID NO: 553 - DNA, 20 bp, Unknown
  Description of Unknown: gRNA target site sequence
cttcaacaacagcattattc

SEQ ID NO: 554 - DNA, 20 bp, Unknown
  Description of Unknown: gRNA target site sequence
caacaacagcattattccag

SEQ ID NO: 555 - DNA, 20 bp, Unknown
  Description of Unknown: gRNA target site sequence
ccagaagacaccttcttccc

SEQ ID NO: 556 - DNA, 20 bp, Unknown
  Description of Unknown: gRNA target site sequence
agacaccttcttccccagcc

SEQ ID NO: 557 - DNA, 20 bp, Unknown
  Description of Unknown: gRNA target site sequence
gacaccttcttccccagccc

SEQ ID NO: 558 - DNA, 20 bp, Unknown
  Description of Unknown: gRNA target site sequence
ccttcttccccagcccaggt

SEQ ID NO: 559 - DNA, 20 bp, Unknown
  Description of Unknown: gRNA target site sequence
cttcttccccagcccaggta

SEQ ID NO: 560 - DNA, 20 bp, Unknown
  Description of Unknown: gRNA target site sequence
ttcttccccagcccaggtaa

SEQ ID NO: 561 - DNA, 20 bp, Unknown
  Description of Unknown: gRNA target site sequence
ttccccagcccaggtaaggg

SEQ ID NO: 562 - DNA, 20 bp, Unknown
  Description of Unknown: gRNA target site sequence
agcccaggtaagggcagctt

SEQ ID NO: 563 - DNA, 20 bp, Unknown
  Description of Unknown: gRNA target site sequence
gcaccaaagctgcccttacc

SEQ ID NO: 564 - DNA, 20 bp, Unknown
  Description of Unknown: gRNA target site sequence
caccaaagctgcccttacct

SEQ ID NO: 565 - DNA, 20 bp, Unknown
  Description of Unknown: gRNA target site sequence
aaagctgcccttacctgggc

SEQ ID NO: 566 - DNA, 20 bp, Unknown
  Description of Unknown: gRNA target site sequence
aagctgcccttacctgggct

SEQ ID NO: 567 - DNA, 20 bp, Unknown
  Description of Unknown: gRNA target site sequence
agctgcccttacctgggctg

SEQ ID NO: 568 - DNA, 20 bp, Unknown
  Description of Unknown: gRNA target site sequence
tgcccttacctgggctgggg

SEQ ID NO: 569 - DNA, 20 bp, Unknown
  Description of Unknown: gRNA target site sequence
ccttacctgggctggggaag

SEQ ID NO: 570 - DNA, 20 bp, Unknown
  Description of Unknown: gRNA target site sequence
cttacctgggctggggaaga

SEQ ID NO: 571 - DNA, 20 bp, Unknown
  Description of Unknown: gRNA target site sequence
ctggggaagaaggtgtcttc

SEQ ID NO: 572 - DNA, 20 bp, Unknown
  Description of Unknown: gRNA target site sequence
ctggaataatgctgttgttg

SEQ ID NO: 573 - DNA, 20 bp, Unknown
  Description of Unknown: gRNA target site sequence
tggaataatgctgttgttga

SEQ ID NO: 574 - DNA, 20 bp, Unknown
  Description of Unknown: gRNA target site sequence
tgaaggcgtttgcacatgca

SEQ ID NO: 575 - DNA, 20 bp, Unknown
  Description of Unknown: gRNA target site sequence
ggcgtttgcacatgcaaagt

SEQ ID NO: 576 - DNA, 20 bp, Unknown
  Description of Unknown: gRNA target site sequence
caaagtcagatttgttgctc

SEQ ID NO: 577 - DNA, 20 bp, Unknown
  Description of Unknown: gRNA target site sequence
aaagtcagatttgttgctcc

SEQ ID NO: 578 - DNA, 20 bp, Unknown
  Description of Unknown: gRNA target site sequence
agatttgttgctccaggcca

SEQ ID NO: 579 - DNA, 20 bp, Unknown
  Description of Unknown: gRNA target site sequence
ccacagcactgttgctcttg

SEQ ID NO: 580 - DNA, 20 bp, Unknown
  Description of Unknown: gRNA target site sequence
actgttgctcttgaagtcca

SEQ ID NO: 581 - DNA, 20 bp, Unknown
  Description of Unknown: gRNA target site sequence
aagtccatagacctcatgtc

SEQ ID NO: 582 - DNA, 20 bp, Unknown
  Description of Unknown: gRNA target site sequence
catagacctcatgtctagca

SEQ ID NO: 583 - DNA, 20 bp, Unknown
  Description of Unknown: gRNA target site sequence
tttgtctgtgatatacacat

SEQ ID NO: 584 - DNA, 20 bp, Unknown
  Description of Unknown: gRNA target site sequence
actttgtgacacatttgttt

SEQ ID NO: 585 - DNA, 20 bp, Unknown
  Description of Unknown: gRNA target site sequence
atttgtttgagaatcaaaat

SEQ ID NO: 586 - DNA, 20 bp, Unknown
  Description of Unknown: gRNA target site sequence
tgagaatcaaaatcggtgaa

SEQ ID NO: 587 - DNA, 20 bp, Unknown
  Description of Unknown: gRNA target site sequence
gagaatcaaaatcggtgaat

SEQ ID NO: 588 - DNA, 20 bp, Unknown
  Description of Unknown: gRNA target site sequence
aatcaaaatcggtgaatagg

SEQ ID NO: 589 - DNA, 20 bp, Unknown
  Description of Unknown: gRNA target site sequence
aaaatcggtgaataggcaga

SEQ ID NO: 590 - DNA, 20 bp, Unknown
  Description of Unknown: gRNA target site sequence
taggcagacagacttgtcac

SEQ ID NO: 591 - DNA, 20 bp, Unknown
  Description of Unknown: gRNA target site sequence
gacagacttgtcactggatt

SEQ ID NO: 592 - DNA, 20 bp, Unknown
  Description of Unknown: gRNA target site sequence
cagacttgtcactggattta

SEQ ID NO: 593 - DNA, 20 bp, Unknown
  Description of Unknown: gRNA target site sequence
tcactggatttagagtctct

SEQ ID NO: 594 - DNA, 20 bp, Unknown
  Description of Unknown: gRNA target site sequence
tggatttagagtctctcagc

SEQ ID NO: 595 - DNA, 20 bp, Unknown
  Description of Unknown: gRNA target site sequence
agagtctctcagctggtaca

SEQ ID NO: 596 - DNA, 20 bp, Unknown
  Description of Unknown: gRNA target site sequence
gtctctcagctggtacacgg

SEQ ID NO: 597 - DNA, 20 bp, Unknown
  Description of Unknown: gRNA target site sequence
tctctcagctggtacacggc

SEQ ID NO: 598 - DNA, 20 bp, Unknown
  Description of Unknown: gRNA target site sequence
ctctcagctggtacacggca

SEQ ID NO: 599 - DNA, 20 bp, Unknown
  Description of Unknown: gRNA target site sequence
cagctggtacacggcagggt

SEQ ID NO: 600 - DNA, 20 bp, Unknown
  Description of Unknown: gRNA target site sequence
agctggtacacggcagggtc

SEQ ID NO: 601 - DNA, 20 bp, Unknown
  Description of Unknown: gRNA target site sequence
gctggtacacggcagggtca

SEQ ID NO: 602 - DNA, 20 bp, Unknown
  Description of Unknown: gRNA target site sequence
acacggcagggtcagggttc

SEQ ID NO: 603 - DNA, 20 bp, Unknown
  Description of Unknown: gRNA target site sequence
gtcagggttctggatatctg

SEQ ID NO: 604 - DNA, 20 bp, Unknown
  Description of Unknown: gRNA target site sequence
tcagggttctggatatctgt

SEQ ID NO: 605 - DNA, 20 bp, Unknown
  Description of Unknown: gRNA target site sequence
gttctggatatctgtgggac

SEQ ID NO: 606 - DNA, 20 bp, Unknown
  Description of Unknown: gRNA target site sequence
tctggatatctgtgggacaa

SEQ ID NO: 607 - DNA, 20 bp, Unknown
  Description of Unknown: gRNA target site sequence
ctggatatctgtgggacaag

SEQ ID NO: 608 - DNA, 20 bp, Unknown
  Description of Unknown: gRNA target site sequence
tatctgtgggacaagaggat

SEQ ID NO: 609 - DNA, 20 bp, Unknown
  Description of Unknown: gRNA target site sequence
atctgtgggacaagaggatc

SEQ ID NO: 610 - DNA, 20 bp, Unknown
  Description of Unknown: gRNA target site sequence
tgaaaaacgtgttcccaccc

SEQ ID NO: 611 - DNA, 20 bp, Unknown
  Description of Unknown: gRNA target site sequence
gaaaaacgtgttcccacccg

SEQ ID NO: 612 - DNA, 20 bp, Unknown
  Description of Unknown: gRNA target site sequence
cacccgaggtcgctgtgttt

SEQ ID NO: 613 - DNA, 20 bp, Unknown
  Description of Unknown: gRNA target site sequence
ggtcgctgtgtttgagccat

SEQ ID NO: 614 - DNA, 20 bp, Unknown
  Description of Unknown: gRNA target site sequence
cgctgtgtttgagccatcag

SEQ ID NO: 615 - DNA, 20 bp, Unknown
  Description of Unknown: gRNA target site sequence
tgtgtttgagccatcagaag

SEQ ID NO: 616 - DNA, 20 bp, Unknown
  Description of Unknown: gRNA target site sequence
tgtttgagccatcagaagca

SEQ ID NO: 617 - DNA, 20 bp, Unknown
  Description of Unknown: gRNA target site sequence
cagagatctcccacacccaa

SEQ ID NO: 618 - DNA, 20 bp, Unknown
  Description of Unknown: gRNA target site sequence
agagatctcccacacccaaa

SEQ ID NO: 619 - DNA, 20 bp, Unknown
  Description of Unknown: gRNA target site sequence
ccacacccaaaaggccacac

SEQ ID NO: 620 - DNA, 20 bp, Unknown
  Description of Unknown: gRNA target site sequence
aaaggccacactggtgtgcc

SEQ ID NO: 621 - DNA, 20 bp, Unknown
  Description of Unknown: gRNA target site sequence
cacactggtgtgcctggcca

SEQ ID NO: 622 - DNA, 20 bp, Unknown
  Description of Unknown: gRNA target site sequence
acactggtgtgcctggccac

SEQ ID NO: 623 - DNA, 20 bp, Unknown
  Description of Unknown: gRNA target site sequence
aggcttctaccccgaccacg

SEQ ID NO: 624 - DNA, 20 bp, Unknown
  Description of Unknown: gRNA target site sequence
gcttctaccccgaccacgtg

SEQ ID NO: 625 - DNA, 20 bp, Unknown
  Description of Unknown: gRNA target site sequence
taccccgaccacgtggagct

SEQ ID NO: 626 - DNA, 20 bp, Unknown
  Description of Unknown: gRNA target site sequence
ccgaccacgtggagctgagc

SEQ ID NO: 627 - DNA, 20 bp, Unknown
  Description of Unknown: gRNA target site sequence
accacgtggagctgagctgg

SEQ ID NO: 628 - DNA, 20 bp, Unknown
  Description of Unknown: gRNA target site sequence
ccacgtggagctgagctggt

SEQ ID NO: 629 - DNA, 20 bp, Unknown
  Description of Unknown: gRNA target site sequence
gagctgagctggtgggtgaa

SEQ ID NO: 630 - DNA, 20 bp, Unknown
  Description of Unknown: gRNA target site sequence
agctgagctggtgggtgaat

SEQ ID NO: 631 - DNA, 20 bp, Unknown
  Description of Unknown: gRNA target site sequence
tgagctggtgggtgaatggg

SEQ ID NO: 632 - DNA, 20 bp, Unknown
  Description of Unknown: gRNA target site sequence
gagctggtgggtgaatggga

SEQ ID NO: 633 - DNA, 20 bp, Unknown
  Description of Unknown: gRNA target site sequence
gctggtgggtgaatgggaag

SEQ ID NO: 634 - DNA, 20 bp, Unknown
  Description of Unknown: gRNA target site sequence
ctggtgggtgaatgggaagg

SEQ ID NO: 635 - DNA, 20 bp, Unknown
  Description of Unknown: gRNA target site sequence
gtgaatgggaaggaggtgca

SEQ ID NO: 636 - DNA, 20 bp, Unknown
  Description of Unknown: gRNA target site sequence
aatgggaaggaggtgcacag

SEQ ID NO: 637 - DNA, 20 bp, Unknown
  Description of Unknown: gRNA target site sequence
atgggaaggaggtgcacagt

SEQ ID NO: 638 - DNA, 20 bp, Unknown
  Description of Unknown: gRNA target site sequence
tgggaaggaggtgcacagtg

SEQ ID NO: 639 - DNA, 20 bp, Unknown
  Description of Unknown: gRNA target site sequence
aaggaggtgcacagtggggt

SEQ ID NO: 640 - DNA, 20 bp, Unknown
  Description of Unknown: gRNA target site sequence
ggtgcacagtggggtcagca

SEQ ID NO: 641 - DNA, 20 bp, Unknown
  Description of Unknown: gRNA target site sequence
gtggggtcagcacagacccg

SEQ ID NO: 642 - DNA, 20 bp, Unknown
  Description of Unknown: gRNA target site sequence
gcacagacccgcagcccctc

SEQ ID NO: 643 - DNA, 20 bp, Unknown
  Description of Unknown: gRNA target site sequence
cacagacccgcagcccctca

SEQ ID NO: 644 - DNA, 20 bp, Unknown
  Description of Unknown: gRNA target site sequence
cagacccgcagcccctcaag

SEQ ID NO: 645 - DNA, 20 bp, Unknown
  Description of Unknown: gRNA target site sequence
acccgcagcccctcaaggag

SEQ ID NO: 646 - DNA, 20 bp, Unknown
  Description of Unknown: gRNA target site sequence
cagcccgccctcaatgactc

SEQ ID NO: 647 - DNA, 20 bp, Unknown
  Description of Unknown: gRNA target site sequence
aatgactccagatactgcct

SEQ ID NO: 648 - DNA, 20 bp, Unknown
  Description of Unknown: gRNA target site sequence
gactccagatactgcctgag

SEQ ID NO: 649 - DNA, 20 bp, Unknown
  Description of Unknown: gRNA target site sequence
tactgcctgagcagccgcct

SEQ ID NO: 650 - DNA, 20 bp, Unknown
  Description of Unknown: gRNA target site sequence
actgcctgagcagccgcctg

SEQ ID NO: 651 - DNA, 20 bp, Unknown
  Description of Unknown: gRNA target site sequence
ctgcctgagcagccgcctga

SEQ ID NO: 652 - DNA, 20 bp, Unknown
  Description of Unknown: gRNA target site sequence
gagcagccgcctgagggtct

SEQ ID NO: 653 - DNA, 20 bp, Unknown
  Description of Unknown: gRNA target site sequence
tgagggtctcggccaccttc

SEQ ID NO: 654 - DNA, 20 bp, Unknown
  Description of Unknown: gRNA target site sequence
gggtctcggccaccttctgg

SEQ ID NO: 655 - DNA, 20 bp, Unknown
  Description of Unknown: gRNA target site sequence
ccgcaaccacttccgctgtc

SEQ ID NO: 656 - DNA, 20 bp, Unknown
  Description of Unknown: gRNA target site sequence
accacttccgctgtcaagtc

SEQ ID NO: 657 - DNA, 20 bp, Unknown
  Description of Unknown: gRNA target site sequence
cgctgtcaagtccagttcta

SEQ ID NO: 658 - DNA, 20 bp, Unknown
  Description of Unknown: gRNA target site sequence
gctgtcaagtccagttctac

SEQ ID NO: 659 - DNA, 20 bp, Unknown
  Description of Unknown: gRNA target site sequence
agtccagttctacgggctct

SEQ ID NO: 660 - DNA, 20 bp, Unknown
  Description of Unknown: gRNA target site sequence
tccagttctacgggctctcg

SEQ ID NO: 661 - DNA, 20 bp, Unknown
  Description of Unknown: gRNA target site sequence
acgggctctcggagaatgac

SEQ ID NO: 662 - DNA, 20 bp, Unknown
  Description of Unknown: gRNA target site sequence
ggctctcggagaatgacgag

SEQ ID NO: 663 - DNA, 20 bp, Unknown
  Description of Unknown: gRNA target site sequence
cggagaatgacgagtggacc

SEQ ID NO: 664 - DNA, 20 bp, Unknown
  Description of Unknown: gRNA target site sequence
ggagaatgacgagtggaccc

SEQ ID NO: 665 - DNA, 20 bp, Unknown
  Description of Unknown: gRNA target site sequence
aatgacgagtggacccagga

SEQ ID NO: 666 - DNA, 20 bp, Unknown
  Description of Unknown: gRNA target site sequence
atgacgagtggacccaggat

SEQ ID NO: 667 - DNA, 20 bp, Unknown
  Description of Unknown: gRNA target site sequence
tgacgagtggacccaggata

SEQ ID NO: 668 - DNA, 20 bp, Unknown
  Description of Unknown: gRNA target site sequence
atagggccaaacctgtcacc

SEQ ID NO: 669 - DNA, 20 bp, Unknown
  Description of Unknown: gRNA target site sequence
aaacctgtcacccagatcgt

SEQ ID NO: 670 - DNA, 20 bp, Unknown
  Description of Unknown: gRNA target site sequence
tcacccagatcgtcagcgcc

SEQ ID NO: 671 - DNA, 20 bp, Unknown
  Description of Unknown: gRNA target site sequence
cacccagatcgtcagcgccg

SEQ ID NO: 672 - DNA, 20 bp, Unknown
  Description of Unknown: gRNA target site sequence
agatcgtcagcgccgaggcc

SEQ ID NO: 673 - DNA, 20 bp, Unknown
  Description of Unknown: gRNA target site sequence
gatcgtcagcgccgaggcct

SEQ ID NO: 674 - DNA, 20 bp, Unknown
  Description of Unknown: gRNA target site sequence
atcgtcagcgccgaggcctg

SEQ ID NO: 675 - DNA, 20 bp, Unknown
  Description of Unknown: gRNA target site sequence
gtcagcgccgaggcctgggg

SEQ ID NO: 676 - DNA, 20 bp, Unknown
  Description of Unknown: gRNA target site sequence
cagcgccgaggcctggggta

SEQ ID NO: 677 - DNA, 20 bp, Unknown
  Description of Unknown: gRNA target site sequence
cgccgaggcctggggtagag

SEQ ID NO: 678 - DNA, 20 bp, Unknown
  Description of Unknown: gRNA target site sequence
gccgaggcctggggtagagc

SEQ ID NO: 679 - DNA, 20 bp, Unknown
  Description of Unknown: gRNA target site sequence
aggcctggggtagagcaggt

SEQ ID NO: 680 - DNA, 20 bp, Unknown
  Description of Unknown: gRNA target site sequence
cctggggtagagcaggtgag

SEQ ID NO: 681 - DNA, 20 bp, Unknown
  Description of Unknown: gRNA target site sequence
ctggggtagagcaggtgagt

SEQ ID NO: 682 - DNA, 20 bp, Unknown
  Description of Unknown: gRNA target site sequence
tggggtagagcaggtgagtg

SEQ ID NO: 683 - DNA, 20 bp, Unknown
  Description of Unknown: gRNA target site sequence
tagagcaggtgagtggggcc

SEQ ID NO: 684 - DNA, 20 bp, Unknown
  Description of Unknown: gRNA target site sequence
agagcaggtgagtggggcct

SEQ ID NO: 685 - DNA, 20 bp, Unknown
  Description of Unknown: gRNA target site sequence
gagcaggtgagtggggcctg

SEQ ID NO: 686 - DNA, 20 bp, Unknown
  Description of Unknown: gRNA target site sequence
gcaggtgagtggggcctggg

SEQ ID NO: 687 - DNA, 20 bp, Unknown
  Description of Unknown: gRNA target site sequence
cccactcacctgctctaccc

SEQ ID NO: 688 - DNA, 20 bp, Unknown
  Description of Unknown: gRNA target site sequence
ccactcacctgctctacccc

SEQ ID NO: 689 - DNA, 20 bp, Unknown
  Description of Unknown: gRNA target site sequence
acctgctctaccccaggcct

SEQ ID NO: 690 - DNA, 20 bp, Unknown
  Description of Unknown: gRNA target site sequence
aggcctcggcgctgacgatc

SEQ ID NO: 691 - DNA, 20 bp, Unknown
  Description of Unknown: gRNA target site sequence
ggcctcggcgctgacgatct

SEQ ID NO: 692 - DNA, 20 bp, Unknown
  Description of Unknown: gRNA target site sequence
ggcgctgacgatctgggtga

SEQ ID NO: 693 - DNA, 20 bp, Unknown
  Description of Unknown: gRNA target site sequence
gcgctgacgatctgggtgac

SEQ ID NO: 694 - DNA, 20 bp, Unknown
  Description of Unknown: gRNA target site sequence
gacgatctgggtgacaggtt

SEQ ID NO: 695 - DNA, 20 bp, Unknown
  Description of Unknown: gRNA target site sequence
tgacaggtttggccctatcc

SEQ ID NO: 696 - DNA, 20 bp, Unknown
  Description of Unknown: gRNA target site sequence
gacaggtttggccctatcct

SEQ ID NO: 697 - DNA, 20 bp, Unknown
  Description of Unknown: gRNA target site sequence
gggtccactcgtcattctcc

SEQ ID NO: 698 - DNA, 20 bp, Unknown
  Description of Unknown: gRNA target site sequence
gtccactcgtcattctccga

SEQ ID NO: 699 - DNA, 20 bp, Unknown
  Description of Unknown: gRNA target site sequence
cgtcattctccgagagcccg

SEQ ID NO: 700 - DNA, 20 bp, Unknown
  Description of Unknown: gRNA target site sequence
tctccgagagcccgtagaac

SEQ ID NO: 701 - DNA, 20 bp, Unknown
  Description of Unknown: gRNA target site sequence
gcccgtagaactggacttga

SEQ ID NO: 702 - DNA, 20 bp, Unknown
  Description of Unknown: gRNA target site sequence
cgtagaactggacttgacag

SEQ ID NO: 703 - DNA, 20 bp, Unknown
  Description of Unknown: gRNA target site sequence
agaactggacttgacagcgg

SEQ ID NO: 704 - DNA, 20 bp, Unknown
  Description of Unknown: gRNA target site sequence
actggacttgacagcggaag

SEQ ID NO: 705 - DNA, 20 bp, Unknown
  Description of Unknown: gRNA target site sequence
cttgacagcggaagtggttg

SEQ ID NO: 706 - DNA, 20 bp, Unknown
  Description of Unknown: gRNA target site sequence
ttgacagcggaagtggttgc

SEQ ID NO: 707 - DNA, 20 bp, Unknown
  Description of Unknown: gRNA target site sequence
tgacagcggaagtggttgcg

SEQ ID NO: 708 - DNA, 20 bp, Unknown
  Description of Unknown: gRNA target site sequence
gacagcggaagtggttgcgg

SEQ ID NO: 709 - DNA, 20 bp, Unknown
  Description of Unknown: gRNA target site sequence
agtggttgcgggggttctgc

SEQ ID NO: 710 - DNA, 20 bp, Unknown
  Description of Unknown: gRNA target site sequence
ggttgcgggggttctgccag

SEQ ID NO: 711 - DNA, 20 bp, Unknown
  Description of Unknown: gRNA target site sequence
gttgcgggggttctgccaga

SEQ ID NO: 712 - DNA, 20 bp, Unknown
  Description of Unknown: gRNA target site sequence
gcgggggttctgccagaagg

SEQ ID NO: 713 - DNA, 20 bp, Unknown
  Description of Unknown: gRNA target site sequence
ggttctgccagaaggtggcc

SEQ ID NO: 714 - DNA, 20 bp, Unknown
  Description of Unknown: gRNA target site sequence
cagaaggtggccgagaccct

SEQ ID NO: 715 - DNA, 20 bp, Unknown
  Description of Unknown: gRNA target site sequence
agaaggtggccgagaccctc

SEQ ID NO: 716 - DNA, 20 bp, Unknown
  Description of Unknown: gRNA target site sequence
aggtggccgagaccctcagg

SEQ ID NO: 717 - DNA, 20 bp, Unknown
  Description of Unknown: gRNA target site sequence
gagaccctcaggcggctgct

SEQ ID NO: 718 - DNA, 20 bp, Unknown
  Description of Unknown: gRNA target site sequence
agaccctcaggcggctgctc

SEQ ID NO: 719 - DNA, 20 bp, Unknown
  Description of Unknown: gRNA target site sequence
ccctcaggcggctgctcagg

SEQ ID NO: 720 - DNA, 20 bp, Unknown
  Description of Unknown: gRNA target site sequence
gcggctgctcaggcagtatc

SEQ ID NO: 721 - DNA, 20 bp, Unknown
  Description of Unknown: gRNA target site sequence
ggctgctcaggcagtatctg

SEQ ID NO: 722 - DNA, 20 bp, Unknown
  Description of Unknown: gRNA target site sequence
aggcagtatctggagtcatt

SEQ ID NO: 723 - DNA, 20 bp, Unknown
  Description of Unknown: gRNA target site sequence
ggcagtatctggagtcattg

SEQ ID NO: 724 - DNA, 20 bp, Unknown
  Description of Unknown: gRNA target site sequence
gcagtatctggagtcattga

SEQ ID NO: 725 - DNA, 20 bp, Unknown
  Description of Unknown: gRNA target site sequence
gtatctggagtcattgaggg

SEQ ID NO: 726 - DNA, 20 bp, Unknown
  Description of Unknown: gRNA target site sequence
tatctggagtcattgagggc

SEQ ID NO: 727 - DNA, 20 bp, Unknown
  Description of Unknown: gRNA target site sequence
ttgagggcgggctgctcctt

SEQ ID NO: 728 - DNA, 20 bp, Unknown
  Description of Unknown: gRNA target site sequence
tgagggcgggctgctccttg

SEQ ID NO: 729 - DNA, 20 bp, Unknown
  Description of Unknown: gRNA target site sequence
gagggcgggctgctccttga

SEQ ID NO: 730 - DNA, 20 bp, Unknown
  Description of Unknown: gRNA target site sequence
agggcgggctgctccttgag

SEQ ID NO: 731 - DNA, 20 bp, Unknown
  Description of Unknown: gRNA target site sequence
ggctgctccttgaggggctg

SEQ ID NO: 732 - DNA, 20 bp, Unknown
  Description of Unknown: gRNA target site sequence
gctgctccttgaggggctgc

SEQ ID NO: 733 - DNA, 20 bp, Unknown
  Description of Unknown: gRNA target site sequence
cctccttcccattcacccac

SEQ ID NO: 734 - DNA, 20 bp, Unknown
  Description of Unknown: gRNA target site sequence
ttcccattcacccaccagct

SEQ ID NO: 735 - DNA, 20 bp, Unknown
  Description of Unknown: gRNA target site sequence
cccaccagctcagctccacg

SEQ ID NO: 736 - DNA, 20 bp, Unknown
  Description of Unknown: gRNA target site sequence
ccagctcagctccacgtggt

SEQ ID NO: 737 - DNA, 20 bp, Unknown
  Description of Unknown: gRNA target site sequence
cagctcagctccacgtggtc

SEQ ID NO: 738 - DNA, 20 bp, Unknown
  Description of Unknown: gRNA target site sequence
agctcagctccacgtggtcg

SEQ ID NO: 739 - DNA, 20 bp, Unknown
  Description of Unknown: gRNA target site sequence
tcagctccacgtggtcgggg

SEQ ID NO: 740 - DNA, 20 bp, Unknown
  Description of Unknown: gRNA target site sequence
gctccacgtggtcggggtag

SEQ ID NO: 741 - DNA, 20 bp, Unknown
  Description of Unknown: gRNA target site sequence
gtggtcggggtagaagcctg

SEQ ID NO: 742 - DNA, 20 bp, Unknown
  Description of Unknown: gRNA target site sequence
tcggggtagaagcctgtggc

SEQ ID NO: 743 - DNA, 20 bp, Unknown
  Description of Unknown: gRNA target site sequence
cggggtagaagcctgtggcc

SEQ ID NO: 744 - DNA, 20 bp, Unknown
  Description of Unknown: gRNA target site sequence
aagcctgtggccaggcacac

SEQ ID NO: 745 - DNA, 20 bp, Unknown
  Description of Unknown: gRNA target site sequence
tgtggccaggcacaccagtg

SEQ ID NO: 746 - DNA, 20 bp, Unknown
  Description of Unknown: gRNA target site sequence
ggcacaccagtgtggccttt

SEQ ID NO: 747 - DNA, 20 bp, Unknown
  Description of Unknown: gRNA target site sequence
gcacaccagtgtggcctttt

SEQ ID NO: 748 - DNA, 20 bp, Unknown
  Description of Unknown: gRNA target site sequence
ccagtgtggccttttgggtg

SEQ ID NO: 749 - DNA, 20 bp, Unknown
  Description of Unknown: gRNA target site sequence
cagtgtggccttttgggtgt

SEQ ID NO: 750 - DNA, 20 bp, Unknown
  Description of Unknown: gRNA target site sequence
gtgtggccttttgggtgtgg

SEQ ID NO: 751 - DNA, 20 bp, Unknown
  Description of Unknown: gRNA target site sequence
tgggagatctctgcttctga

SEQ ID NO: 752 - DNA, 20 bp, Unknown
  Description of Unknown: gRNA target site sequence
tgcttctgatggctcaaaca

SEQ ID NO: 753 - DNA, 20 bp, Unknown
  Description of Unknown: gRNA target site sequence
tggctcaaacacagcgacct

SEQ ID NO: 754 - DNA, 20 bp, Unknown
  Description of Unknown: gRNA target site sequence
ggctcaaacacagcgacctc

SEQ ID NO: 755 - DNA, 20 bp, Unknown
  Description of Unknown: gRNA target site sequence
tcaaacacagcgacctcggg

SEQ ID NO: 756 - DNA, 20 bp, Unknown
  Description of Unknown: gRNA target site sequence
caaacacagcgacctcgggt

SEQ ID NO: 757 - DNA, 20 bp, Unknown
  Description of Unknown: gRNA target site sequence
tcgggtgggaacacgttttt

SEQ ID NO: 758 - DNA, 20 bp, Unknown
  Description of Unknown: gRNA target site sequence
cgggtgggaacacgtttttc

SEQ ID NO: 759 - DNA, 20 bp, Unknown
  Description of Unknown: gRNA target site sequence
aacacgtttttcaggtcctc

SEQ ID NO: 760 - DNA, 20 bp, Unknown
  Description of Unknown: gRNA target site sequence
cgtttttcaggtcctctgga

SEQ ID NO: 761 - DNA, 20 bp, Unknown
  Description of Unknown: gRNA target site sequence
gtttttcaggtcctctggaa

SEQ ID NO: 762 - DNA, 20 bp, Unknown
  Description of Unknown: gRNA target site sequence
tttttcaggtcctctggaaa

SEQ ID NO: 763 - DNA, 20 bp, Unknown
  Description of Unknown: gRNA target site sequence
ttcaggtcctctggaaaggg

SEQ ID NO: 764 - DNA, 20 bp, Unknown
  Description of Unknown: gRNA target site sequence
caggtcctctggaaagggaa

SEQ ID NO: 765 - DNA, 20 bp, Unknown
  Description of Unknown: gRNA target site sequence
aggtcctctggaaagggaag

SEQ ID NO: 766 - DNA, 20 bp, Unknown
  Description of Unknown: gRNA target site sequence
gatgtctcgctccgtggcct

SEQ ID NO: 767 - DNA, 20 bp, Unknown
  Description of Unknown: gRNA target site sequence
ctcgcgctactctctctttc

SEQ ID NO: 768 - DNA, 20 bp, Unknown
  Description of Unknown: gRNA target site sequence
gactcacgctggatagcctc

SEQ ID NO: 769 - DNA, 20 bp, Unknown
  Description of Unknown: gRNA target site sequence
ccagaaagagagagtagcgc

SEQ ID NO: 770 - DNA, 20 bp, Unknown
  Description of Unknown: gRNA target site sequence
cacagctaaggccacggagc

SEQ ID NO: 771 - DNA, 20 bp, Unknown
  Description of Unknown: gRNA target site sequence
ggccgagatgtctcgctccg

SEQ ID NO: 772 - DNA, 20 bp, Unknown
  Description of Unknown: gRNA target site sequence
ttgcgggagcgcatgccttt

SEQ ID NO: 773 - DNA, 20 bp, Unknown
  Description of Unknown: gRNA target site sequence
ccacctcttgatggggctag

SEQ ID NO: 774 - DNA, 20 bp, Unknown
  Description of Unknown: gRNA target site sequence
ataccttgggttgatccact

SEQ ID NO: 775 - DNA, 20 bp, Unknown
  Description of Unknown: gRNA target site sequence
cgtgagtaaacctgaatctt

SEQ ID NO: 776 - DNA, 20 bp, Unknown
  Description of Unknown: gRNA target site sequence
agtcaacttcaatgtcggaa

SEQ ID NO: 777 - DNA, 20 bp, Unknown
  Description of Unknown: gRNA target site sequence
catagatcgagacatgtaag

SEQ ID NO: 778 - DNA, 20 bp, Unknown
  Description of Unknown: gRNA target site sequence
gctactctctctttctggcc

SEQ ID NO: 779 - DNA, 20 bp, Unknown
  Description of Unknown: gRNA target site sequence
acccaaaccaagcctttcta

SEQ ID NO: 780 - DNA, 20 bp, Unknown
  Description of Unknown: gRNA target site sequence
tataagtggaggcgtcgcgc

SEQ ID NO: 781 - protein, 1368 aa, Unknown [sequence omitted]

SEQ ID NO: 782 - DNA, 6173 bp, Homo sapiens
cttctgtgtgtgcacatgtgtaatacatatctgggatcaaagctatctatataaagtccttgattctgtgtgggttcaaacacatttcaaagcttcaggatcctgaaaggttttgctctacttcctgaagacctgaacaccgctcccataaagccatggcttgccttggatttcagcggcacaaggctcagctgaacctggctaccaggacctggccctgcactctcctgttttttcttctcttcatccctgtcttctgcaaaggtgagtgagacttttggagcatgaagatggaggaggtgtttctcctacctgggtttcatttgtttcagcagtcaaaggcagtgatttatagcaaagccagaagttaaaggtaaaactccaatctggcttggctggctctgtattccagggccagcagggagcagttgggcggcagcaaataaggcaaagagatagctcagaacagagcgccaggtatttagtaggggcttcatgaatgcatgtgagttggtttagtagagagacacaggcaatttcagacccttctatgagactggaagtgatttaagagggaaaggatagccatagtcctgaatacatttgagctgggtttcaggatgagctcacaagttcctttaaaaaaaattgacttaagcaaatcctgggaagagtttttttgctatacaattcaaggttttaaggtcctcggattcatatactttataaatgaattagccagcttgtttaaaatgtagggaaattgtgggaagaatgccttctttacttaattcaaggttttaaggttctcttaatcaattctactagctaattagccaattatttaaaaataaaagtttgaaattgccaaaaaaaaaagacaaggaaaaggaaagaaagaaagccaccagtctgtttggcatacaatacttaattgttgcctgacctacgtgtgggtttcagatgcagatcctcagttttcagctcttcagagactgacaccaggtttgttacacggcttaaaatgatgagtatatccattgaatctcaaccttatctctctctagaccttcttggttaagaaaccatgtagtttgtatgaagtaggtactcaaaagatatttgatgatttaatttttactggagaagaaatattcatatatgttttcttatttttacatgttttaaatatgtaaagattaaataaacactcttagaagtatttaaatttcctaaagtaaatttatctcaaccagtaacaggaccctcccaatactggaaagttgagtgtgaccgcatttagtggtgatgagtgtgagcttgcttggggagagggcaggacatttaggatttcttaagcttagagtcaatacaataaagattattgagtgctcacttgggtgggctataatcactgctcacaggagttcatgaaccacaagtaaaagagtgaggagatatgattagctcacaaataactttaatacagagcagaaagtaatgaactactgcaatggagttatcacagtgctaaggatgctcagagggcatctctgataggcagaggtgagggttagggaaggaagctgtagtctagctagctagagctgctggaatagacatgacaatggctgctgccaaactgttttctcttctgaggacagatgtcccgtgcaagtggcttggtggaagggactagtgtctctaatatagggtgatttataagcaggaaagtgtgtcctagaaattcagaccagagtgatagattggaattggatcatgggggactcattgaatgttatttattgtatttgtttttgcgatcagtgttagtaaagtgtcaaagggattgagcagatgagtgacatcatgcaacacaagttttgagtttcacttgtcagactgactggagaggggcctggttagttacaggaaggtaatttggcatgcagccactatttttgagttgatgcaagcctctctgtatggagagctggtctcctttatcctgtgggaaaagagaacaaaggagcatgggagtgttcaagggaaggagaaataaagggcagagaggcagcggtggtgtcaggggaagcccacaggagttaacagcagggttgcctcaacctagagaggaagcgacctggtgccctcggctctgtggcttccttcatctaacaacatcttccactctacaacaatgccagggaaggcggaggctggtacagtgcatcaagacacagctactcctgggtgacagaggttcagggccagctcactaagtaggcagaagtttttgacatatactttgagagataaagcaagattctgtacctcaaccttcagaatttcccctaccactcattatagttccggagctatatagctcctatcattctatcataaccttagaataccagagaacatatcatctcatctaattatctcttactatatgtgaaaaaaatgaaggacatgggggaagtgtgacttgccccaaatcacatatttcatggtagagccaggtcttctgtttgtcatatcagtgttcttcctgccacaaccatcttgaagaatctatttctcagtaagaaaatatctttatggagagtagctggaaaacagttgagagatggaggggaggctgggggtgtggagaggggaaggggtaagtgatagattcgttgaaggggggagaaaaggccgtggggatgaagctagaaggcagaagggcttgcctgggcttggccatgaaggagcatgagttcactgagttccctttggcttttccatgctagcaatgcacgtggcccagcctgctgtggtactggccagcagccgaggcatcgccagctttgtgtgtgagtatgcatctccaggcaaagccactgaggtccgggtgacagtgcttcggcaggctgacagccaggtgactgaagtctgtgcggcaacctacatgatggggaatgagttgaccttcctagatgattccatctgcacgggcacctccagtggaaatcaagtgaacctcactatccaaggactgagggccatggacacgggactctacatctgcaaggtggagctcatgtacccaccgccatactacctgggcataggcaacggaacccagatttatgtaattggtgagcaaagccatttcactgagttgacacctgttgcattgcagtcttctatgcacaaaaacagttttgttccttaatttcaggaggtttacttttaggactgtggacattctctttaagagttctgtaccacatggtagccttgcttattgtgggtggcaaccttaatagcattctgactgtaaaataaaatgatttggggaagttggggctctcgctctggagtgctaaccatcatgacgtttgatctgtacttttgatatgatatgatgctcctggggaagtagtcccaaatagccaaacctattggtgggctacccatgcaatttaggggtggacctcaaggcctggaagctctaatgtccttttttcaccaatgttggggagtagagccctagagtttaaaactgtctcagggaggctctgctttgttttctgttgcagatccagaaccgtgcccagattctgacttcctcctctggatccttgcagcagttagttcggggttgtttttttatagctttctcctcacagctgtttctttgagcaaaatggtgagtgtggtgctgatggtgcaccatgtctgatggggatacctttagtggtatcaactggccaaaagatgatgttgagtttagtgttcttgagatgagatgaggcaataaatgaagaggaaggacagtggtaaagaacgcactagaaccgtaggcattggcatttgaggtttcagaatgactaatattttagatgaatttgtttgacattgaatgttcatgtgcttctgagcagggtttcaatttgagtaaccgttgcaataacatggggcagctgttttgctctttgtcttcatgacaactgtacttaagctaacagccctgaaacatgagattaggctgggcagaatgctgctagagaggaccacttggatggtctttattctccttctccatgtccctctccatcacctggaagtcacctctgggtgccactctggtgccttccttgtcgaagctgtagctgctcacatgacacctatccctgttatccagtttgcttgactgggacgttttgccttccccttcagccaggaagtgaaagtcccagtttttatttatcacaggtgttggtattggtggtagaagaggtagaattatggaatcaggcctcctgtcaggatttctttttgacagtccctctcagacacctctgcctaaggccagctttgccattacaaactctcccttctccctctctcccttcttctcttcctcttccttcttctcgctctttctctctctctctttctccctctctgtctcttatacacatacacaaagatatactctattccaacatcctctacccaacctgacagagatgtcctttgctgtaggttcagcagtggggatgagaaatacagctctcaaacaggataactaaagcttattatcttatcaagcttgttcccttgcagacaagattgatcaattatcataggctttctgggtgttctttctgaagctttctcaaagtctctttctcctatcttccattcaaggcaaatgattgccatttaacatcaaaatcacagttatttatctaaaataaattttaatagctgaatcaagaaaatctcctgaggtttataattctgtatgctgtgaacattcatttttaaccagctagggacccaatatgtgttgagttctattatggttagaagtggcttccgtattcctcagtagtaattactgtttctttttgtgtttgacagctaaagaaaagaagccctcttacaacaggggtctatgtgaaaatgcccccaacagagccagaatgtgaaaagcaatttcagccttattttattcccatcaattgagaaaccattatgaagaagagagtccatatttcaatttccaagagctgaggcaattctaacttttttgctatccagctatttttatttgtttgtgcatttggggggaattcatctctctttaatataaagttggatgcggaacccaaattacgtgtactacaatttaaagcaaaggagtagaaagacagagctgggatgtttctgtcacatcagctccactttcagtgaaagcatcacttgggattaatatggggatgcagcattatgatgtgggtcaaggaattaagttagggaatggcacagcccaaagaaggaaaaggcagggagcgagggagaagactatattgtacacaccttatatttacgtatgagacgtttatagccgaaatgatcttttcaagttaaattttatgccttttatttcttaaacaaatgtatgattacatcaaggcttcaaaaatactcacatggctatgttttagccagtgatgctaaaggttgtattgcatatatacatatatatatatatatatatatatatatatatatatatatatatatatatatatattttaatttgatagtattgtgcatagagccacgtatgtttttgtgtatttgttaatggtttgaatataaacactatatggcagtgtctttccaccttgggtcccagggaagttttgtggaggagctcaggacactaatacaccaggtagaacacaaggtcatttgctaactagcttggaaactggatgaggtcatagcagtgcttgattgcgtggaattgtgctgagttggtgttgacatgtgctttggggcttttacaccagttcctttcaatggtttgcaaggaagccacagctggtggtatctgagttgacttgacagaacactgtcttgaagacaatggcttactccaggagacccacaggtatgaccttctaggaagctccagttcgatgggcccaattcttacaaacatgtggttaatgccatggacagaagaaggcagcaggtggcagaatggggtgcatgaaggtttctgaaaattaacactgcttgtgtttttaactcaatattttccatgaaaatgcaacaacatgtataatatttttaattaaataaaaatctgtggtggtcgtttt

SEQ ID NO: 783 - DNA, 264 bp, Homo sapiens
cttctgtgtgtgcacatgtgtaatacatatctgggatcaaagctatctatataaagtccttgattctgtgtgggttcaaacacatttcaaagcttcaggatcctgaaaggttttgctctacttcctgaagacctgaacaccgctcccataaagccatggcttgccttggatttcagcggcacaaggctcagctgaacctggctaccaggacctggccctgcactctcctgttttttcttctcttcatccctgtcttctgcaaag

SEQ ID NO: 784 - DNA, 348 bp, Homo sapiens
caatgcacgtggcccagcctgctgtggtactggccagcagccgaggcatcgccagctttgtgtgtgagtatgcatctccaggcaaagccactgaggtccgggtgacagtgcttcggcaggctgacagccaggtgactgaagtctgtgcggcaacctacatgatggggaatgagttgaccttcctagatgattccatctgcacgggcacctccagtggaaatcaagtgaacctcactatccaaggactgagggccatggacacgggactctacatctgcaaggtggagctcatgtacccaccgccatactacctgggcataggcaacggaacccagatttatgtaattg

SEQ ID NO: 785 - DNA, 110 bp, Homo sapiens
atccagaaccgtgcccagattctgacttcctcctctggatccttgcagcagttagttcggggttgtttttttatagctttctcctcacagctgtttctttgagcaaaatg

SEQ ID NO: 786 - DNA, 1253 bp, Homo sapiens
ctaaagaaaagaagccctcttacaacaggggtctatgtgaaaatgcccccaacagagccagaatgtgaaaagcaatttcagccttattttattcccatcaattgagaaaccattatgaagaagagagtccatatttcaatttccaagagctgaggcaattctaacttttttgctatccagctatttttatttgtttgtgcatttggggggaattcatctctctttaatataaagttggatgcggaacccaaattacgtgtactacaatttaaagcaaaggagtagaaagacagagctgggatgtttctgtcacatcagctccactttcagtgaaagcatcacttgggattaatatggggatgcagcattatgatgtgggtcaaggaattaagttagggaatggcacagcccaaagaaggaaaaggcagggagcgagggagaagactatattgtacacaccttatatttacgtatgagacgtttatagccgaaatgatcttttcaagttaaattttatgccttttatttcttaaacaaatgtatgattacatcaaggcttcaaaaatactcacatggctatgttttagccagtgatgctaaaggttgtattgcatatatacatatatatatatatatatatatatatatatatatatatatatatatatatatatattttaatttgatagtattgtgcatagagccacgtatgtttttgtgtatttgttaatggtttgaatataaacactatatggcagtgtctttccaccttgggtcccagggaagttttgtggaggagctcaggacactaatacaccaggtagaacacaaggtcatttgctaactagcttggaaactggatgaggtcatagcagtgcttgattgcgtggaattgtgctgagttggtgttgacatgtgctttggggcttttacaccagttcctttcaatggtttgcaaggaagccacagctggtggtatctgagttgacttgacagaacactgtcttgaagacaatggcttactccaggagacccacaggtatgaccttctaggaagctccagttcgatgggcccaattcttacaaacatgtggttaatgccatggacagaagaaggcagcaggtggcagaatggggtgcatgaaggtttctgaaaattaacactgcttgtgtttttaactcaatattttccatgaaaatgcaacaacatgtataatatttttaattaaataaaaatctgtggtggtcgtttt

SEQ ID NO: 787 - DNA, 9026 bp, Homo sapiens
agtttcccttccgctcacctccgcctgagcagtggagaaggcggcactctggtggggctgctccaggcatgcagatcccacaggcgccctggccagtcgtctgggcggtgctacaactgggctggcggccaggatggttcttaggtaggtggggtcggcggtcaggtgtcccagagccaggggtctggagggaccttccaccctcagtccctggcaggtcggggggtgctgaggcgggcctggccctggcagcccaggggtcccggagcgaggggtctggagggacctttcactctcagtccctggcaggtcggggggtgctgtggcaggcccagccttggcccccagctctgccccttaccctgagctgtgtggctttgggcagctcgaactcctgggttcctctctgggccccaactcctcccctggcccaagtcccctctttgctcctgggcaggcaggacctctgtcccctctcagccggtccttggggctgcgtgtttctgtagaatgacgggtcaggctggccagaaccccaaaccttggccgtggggagtctgcgtggcggctctgccttgcccaggcatccttggtcctcactcgagttttcctaaggatgggatgagccccatgtgggactaaccttggctttacgacgtcaaagtttagatgagctggtgatatttttctcattatatccaaagtgtacctgttcgagtgaggacagttcttctgtctccaggatccctcctgggtggggattgtgcccgcctgggtctctgcccagattccagggctctccccgagccctgttcagaccatccgtgggggaggccttggcctcactctcccggatcgaggagagagggagcctcttcctgggctgcccgtgaccctgggccctctgtgtacactgtgaccacagcccgctcctggaccctctgtgcccggctggccctctgtgcccagccagcctgcacctggggatgccaaggcctggggagggtggtttcacccaggccaagcctaagacagtccctctgggccctgctgggtaccggggtgtgacaccactgggaggacaagatgaggggcacccctggggccgccctgacaccccctcgaggctcctgccccgggggtcctggtgccccttcactgtggcaggcgactgggggttccccacctcggcccctctcccggggcctgctccccggcacctgaggcagcatccttgtcagggccgtgccttcctgcctcagcgccacctcttaaggttggcccgtgggtcactcaggactcagaactggagattctgggcaaaaggcaaagagcaaagggccaaaaggcatcccagggagacgactgcgggggaaccagagggcagaggggcgctcgtcacaggggagggggagctgagcgaggcaggaggggagccgagcctctccccccgtgtcccggctcttcaggcacgccctcgggacgccaccctccccgacccaggcgggaaagataagagcaaggtgtccgcagcctgacactcgtgcctcaggtgcccgcgcttgtgccggacaagactctcacaggtggcatgcctcggtttccccactggtaacagcacagggcactcagcaaggcgcagtgggcatgactggggtcctgtgggtcctgacccagatgtggccaccccggccgcagtggtcttcattccaggatgcctcttttccctcctgatctattcactgcgttcgccattcggtcattcccggggccaccactcccacctcaggtgtgtgcttcccttgtgttttatgagatatccccaacccggctgcttattggccccgtccgagggcaggagcataaataagagcctctgctttggcgtgggaccactgtgagctccagtcagcgctgccactgctgagctctgggccttcgacaggacttggccccttactgacttctccgtgtgctttgggtcatgggtgaggacgcctcctggcaaggctgcgtcctgaggattaaatcgggtcatctgtgaaaactacccagcccagcccctgacacttttttgtttgtttcttttagtgacagggtcttgctctgtcacccaggctggagtgcagtggtgtgatctcggctcactcgacctccggggctcaagcaattctcccacctctgcctccagagtagctgggactataggcacgtgccaccctgccaggctaatttcttccattttttttagagacagggtctcgctatgttccccaggctgggctcaaatggtcctcccacctcagcctccccaagtactgggattacaggcataagccactgcatctggcctccatgacacatatttttaaagtctgatttttaaagtcaaacttttgaagtcagattttaaacggactattttgaaaaatatacaaaaacgtttaaaaacaatgaatatccctcacctagaatcaataactaagaatattgacacatttgctttggggactgggcggctggagctgccatgacaaagctccgccgaccgagtggcttttaaacagagcctgccctctcgccgactgagggctggacgtgcaggatggagctccgcagggtcggctcccctgtgctctgaggggctctgctcagcctctcccggctgtggcttaaaaacagagcctgtcctcccgccgtggggggctggacatgcaggaccgaggggccacagggtcggctccctgtgctccgagagggctctgctcagcttctcctggctggggggttttgtggccaccctctgtgttcctgggttcagaagcatcccccaggctctgccttcatctctgcacgggtgactctgtacaggaagccaggcctgctggtcaatggccacccagccctgtgccctcatcttacctagtcccagctgccgtcaccctattcctaataaggccgccttctgaggtcatggggttaggacttccacataggaatctgtggggacacggttcggcccacagcccttcccacctccacacacacacacgactgtgaggagttggaagacctcactcctcacccctgccaggtcctctagggacaagctcgctgtcctcatcccagcacagcccgtgggacggtttccttgtccctaatgggaccacggtcagagatgccgggtctggtctgggccagcaggttcctccgcccggggcaggcagccttcttctgtgcgcttctggaaagcaatgtcctgtaatgcggtctctctgcgggagcacccccaccgccacctcacaggcctgttccacagccccgggatgggctctgtctccctcctgaccctgcatagggcacagccctctctcatcaacccacgatcctacgtggatccgagagggagcacctggggaaacaatggaatcccatagaaacaccccaaatctaacttgatccaggaccagccagtggtcacttctgaatattcaccttcctagtagacactaccagccaagggaggccaggaagccttcctggaggaggtggcctgaggactggggtgaggcaggccctgcgtgggggtcgccacccagcacccccacactgggtgggagccagtctctgagactggctgggggaggtgggagagggggctgcttgaactgcagacaccgaggtctagcccccaccccacccagccagttggtggaggcaggggaggccgaggggcccagctggacctgctccccggggtggattccaaaataggggggttggggggggcggaacaggagcccagggtcctggcttgaggcccagtggctgagggctggtgcaagccagacaggaaaagggttgagcctgtcagcgccagcacagatcaagtcaggagcaggtccctccaccaatgtgtgcaaataaatagcagctaagtttccagttacaagaacaatgcacagatggtcccagggacattgcggtgtggacacacagcggccattgtcctgtcgccagcacctcgccctacagctggggggtcccttagcacttcctagccatgcagggtccctgctcacagtacccgtgatgacttctgttcctcacctgcctgtctgtcccgacagctgcatggcagccctggcctgggagatggagaccccgaggggctgcctgcggtggtggggcccctgggtccccactgcattcccagaaacccagagggcagggcatttcccctgctctgtgccgagtccacccagccccagcctaggcccagtaagggctgcagcccaccctgtcccaggctgcctcccaggagccctcttggccctgatgccagaagcccatcttcctccattcaggcaggtctctgagtgccctggcctggctgcctgctggccctgagagtcacactaccccacagccctccttggtcaaaatccactctggagtggctggaagattccccgggcccacgccgcacacgcctatgcagggagcttcccctggccggccggcagacaagggcggtctcagagagggggctcacctcagcagccccttgtgtagctggccctcgcccctgccacctctgggaacaccaccaggaagctgggggacaggcacgcaggtgaaggaggcgagcgcttgtcagccgggaggccatgggcacagagggaacagggacaccctgggtggcctcaaggtcacttcaaacccctcactcgtcccctgggagggtgcccagtgaggttggcactaggagttggtcctggtcacatgacagacccacccacctctggtgtccagccagcacgccgtgggccagcctggctgcagggacacgagggcagcagccccctcctcctctgagctggttgctccttgagtcatcaccaccgcctgccacggaggccgcctgtcccaggaagcagagggaccgcagctgtggcaaccagggcctggtctctgtgtcacctcgctggggggccgtgcccaggcctgagacggaactgagtgacagtgcactgggtctgacagtgtggggctggcgccatgtttggggaaccctgtggcatgggacctgtgggtgagccgggaaaatcaccccgttgcatggcatctcgggcctggatcttaagcgcctgtgttggtgcctccgcctggcggaagagccgcgacccccacgttgccatgcgggtatcccaagccctgaccctggcaggcatatgtttcaggaggtccttgtcttgggagcccagggtcgggggccccgtgtctgtccacatccgagtcaatggcccatctcgtctctgaagcatctttgctgtgagctctagtccccactgtcttgctggaaaatgtggaggccccactgcccactgcccagggcagcaatgcccataccacgtggtcccagctccgagcttgtcctgaaaagggggcaaagactggaccctgagcctgccaaggggccacactcctcccagggctggggtctccatgggcagccccccacccacccagaccagttacactcccctgtgccagagcagtgcagacaggaccaggccaggatgcccaagggtcaggggctggggatgggtagcccccaaacagccctttctgggggaactggcctcaacggggaagggggtgaaggctcttagtaggaaatcagggagacccaagtcagagccaggtgctgtgcagaagctgcagcctcacgtagaaggaagaggctctgcagtggaggccagtgcccatccccgggtggcagaggccccagcagagacttctcaatgacattccagctggggtggcccttccagagcccttgctgcccgagggatgtgagcaggtggccggggaggctttgtggggccacccagccccttcctcacctctctccatctctcagactccccagacaggccctggaacccccccaccttctccccagccctgctcgtggtgaccgaaggggacaacgccaccttcacctgcagcttctccaacacatcggagagcttcgtgctaaactggtaccgcatgagccccagcaaccagacggacaagctggccgccttccccgaggaccgcagccagcccggccaggactgccgcttccgtgtcacacaactgcccaacgggcgtgacttccacatgagcgtggtcagggcccggcgcaatgacagcggcacctacctctgtggggccatctccctggcccccaaggcgcagatcaaagagagcctgcgggcagagctcagggtgacaggtgcggcctcggaggccccggggcaggggtgagctgagccggtcctggggtgggtgtcccctcctgcacaggatcaggagctccagggtcgtagggcagggaccccccagctccagtccagggctctgtcctgcacctggggaatggtgaccggcatctctgtcctctagctctggaagcaccccagcccctctagtctgccctcacccctgaccctgaccctccaccctgaccccgtcctaacccctgacctttgtgcccttccagagagaagggcagaagtgcccacagcccaccccagcccctcacccaggccagccggccagttccaaaccctggtggttggtgtcgtgggcggcctgctgggcagcctggtgctgctagtctgggtcctggccgtcatctgctcccgggccgcacgaggtaacgtcatcccagcccctcggcctgccctgccctaaccctgctggcggccctcactcccgcctccccttcctccacccttccctcaccccaccccacctccccccatctccccgccaggctaagtccctgatgaaggcccctggactaagaccccccacctaggagcacggctcagggtcggcctggtgaccccaagtgtgtttctctgcagggacaataggagccaggcgcaccggccagcccctggtgagtctcactcttttcctgcatgatccactgtgccttccttcctgggtgggcagaggtggaaggacaggctgggaccacacggcctgcaggactcacattctattatagccaggaccccacctccccagcccccaggcagcaacctcaatccctaaagccatgatctggggccccagcccacctgcggtctccgggggtgcccggcccatgtgtgtgcctgcctgcggtctccaggggtgcctggcccacgcgtgtgcccgcctgcggtctctgggggtgcccggcccacatatgtgcctgcctgcggtctccaggtgtgcccggcccatgcgtgtgcccacctgcgagggcgtggggtgggcttggtcatttcttatcttacattggagacaggagagcttgaaaagtcacattttggaatcctaaatctgcaagaatgccagggacatttcagagggggacattgagccagagaggaggggtggtgtccccagatcacacagagggcagtggtgggacagctcagggtaagcagctcatagtggggggcccaggttcggtgccggtactgcagccaggctgtggagccgcgggcctccttcctgcggtgggccgtggggctgactccctctccctttctcctcaaagaaggaggacccctcagccgtgcctgtgttctctgtggactatggggagctggatttccagtggcgagagaagaccccggagccccccgtgccctgtgtccctgagcagacggagtatgccaccattgtctttcctagcggaatgggcacctcatcccccgcccgcaggggctcagctgacggccctcggagtgcccagccactgaggcctgaggatggacactgctcttggcccctctgaccggcttccttggccaccagtgttctgcagaccctccaccatgagcccgggtcagcgcatttcctcaggagaagcaggcagggtgcaggccattgcaggccgtccaggggctgagctgcctgggggcgaccggggctccagcctgcacctgcaccaggcacagccccaccacaggactcatgtctcaatgcccacagtgagcccaggcagcaggtgtcaccgtcccctacagggagggccagatgcagtcactgcttcaggtcctgccagcacagagctgcctgcgtccagctccctgaatctctgctgctgctgctgctgctgctgctgctgcctgcggcccggggctgaaggcgccgtggccctgcctgacgccccggagcctcctgcctgaacttgggggctggttggagatggccttggagcagccaaggtgcccctggcagtggcatcccgaaacgccctggacgcagggcccaagactgggcacaggagtgggaggtacatggggctggggactccccaggagttatctgctccctgcaggcctagagaagtttcagggaaggtcagaagagctcctggctgtggtgggcagggcaggaaacccctccacctttacacatgcccaggcagcacctcaggccctttgtggggcagggaagctgaggcagtaagcgggcaggcagagctggaggcctttcaggcccagccagcactctggcctcctgccgccgcattccaccccagcccctcacaccactcgggagagggacatcctacggtcccaaggtcaggagggcagggctggggttgactcaggcccctcccagctgtggccacctgggtgttgggagggcagaagtgcaggcacctagggccccccatgtgcccaccctgggagctctccttggaacccattcctgaaattatttaaaggggttggccgggctcccaccagggcctgggtgggaaggtacaggcgttcccccggggcctagtacccccgccgtggcctatccactcctcacatccacacactgcacccccactcctggggcagggccaccagcatccaggcggccagcaggcacctgagtggctgggacaagggatcccccttccctgtggttctattatattataattataattaaatatgagagcatgctaagga

SEQ ID NO: 788 - DNA, 144 bp, Homo sapiens
agtttcccttccgctcacctccgcctgagcagtggagaaggcggcactctggtggggctgctccaggcatgcagatcccacaggcgccctggccagtcgtctgggcggtgctacaactgggctggcggccaggatggttcttag

SEQ ID NO: 789 - DNA, 360 bp, Homo sapiens
actccccagacaggccctggaacccccccaccttctccccagccctgctcgtggtgaccgaaggggacaacgccaccttcacctgcagcttctccaacacatcggagagcttcgtgctaaactggtaccgcatgagccccagcaaccagacggacaagctggccgccttccccgaggaccgcagccagcccggccaggactgccgcttccgtgtcacacaactgcccaacgggcgtgacttccacatgagcgtggtcagggcccggcgcaatgacagcggcacctacctctgtggggccatctccctggcccccaaggcgcagatcaaagagagcctgcgggcagagctcagggtgacag

SEQ ID NO: 790 - DNA, 156 bp, Homo sapiens
agagaagggcagaagtgcccacagcccaccccagcccctcacccaggccagccggccagttccaaaccctggtggttggtgtcgtgggcggcctgctgggcagcctggtgctgctagtctgggtcctggccgtcatctgctcccgggccgcacgag

SEQ ID NO: 791 - DNA, 35 bp, Homo sapiens
ggacaataggagccaggcgcaccggccagcccctg

SEQ ID NO: 792 - DNA, 1417 bp, Homo sapiens
aaggaggacccctcagccgtgcctgtgttctctgtggactatggggagctggatttccagtggcgagagaagaccccggagccccccgtgccctgtgtccctgagcagacggagtatgccaccattgtctttcctagcggaatgggcacctcatcccccgcccgcaggggctcagctgacggccctcggagtgcccagccactgaggcctgaggatggacactgctcttggcccctctgaccggcttccttggccaccagtgttctgcagaccctccaccatgagcccgggtcagcgcatttcctcaggagaagcaggcagggtgcaggccattgcaggccgtccaggggctgagctgcctgggggcgaccggggctccagcctgcacctgcaccaggcacagccccaccacaggactcatgtctcaatgcccacagtgagcccaggcagcaggtgtcaccgtcccctacagggagggccagatgcagtcactgcttcaggtcctgccagcacagagctgcctgcgtccagctccctgaatctctgctgctgctgctgctgctgctgctgctgcctgcggcccggggctgaaggcgccgtggccctgcctgacgccccggagcctcctgcctgaacttgggggctggttggagatggccttggagcagccaaggtgcccctggcagtggcatcccgaaacgccctggacgcagggcccaagactgggcacaggagtgggaggtacatggggctggggactccccaggagttatctgctccctgcaggcctagagaagtttcagggaaggtcagaagagctcctggctgtggtgggcagggcaggaaacccctccacctttacacatgcccaggcagcacctcaggccctttgtggggcagggaagctgaggcagtaagcgggcaggcagagctggaggcctttcaggcccagccagcactctggcctcctgccgccgcattccaccccagcccctcacaccactcgggagagggacatcctacggtcccaaggtcaggagggcagggctggggttgactcaggcccctcccagctgtggccacctgggtgttgggagggcagaagtgcaggcacctagggccccccatgtgcccaccctgggagctctccttggaacccattcctgaaattatttaaaggggttggccgggctcccaccagggcctgggtgggaaggtacaggcgttcccccggggcctagtacccccgccgtggcctatccactcctcacatccacacactgcacccccactcctggggcagggccaccagcatccaggcggccagcaggcacctgagtggctgggacaagggatcccccttccctgtggttctattatattataattataattaaatatgagagcatgctaagga

SEQ ID NO: 793 - DNA, 23 bp, Unknown
  Description of Unknown: gRNA target site sequence
cccaacgggcgtgacttccacat

SEQ ID NO: 794 - DNA, 23 bp, Unknown
  Description of Unknown: gRNA target site sequence
cctggtggttggtgtcgtgggcg

SEQ ID NO: 795 - DNA, 23 bp, Unknown
  Description of Unknown: gRNA target site sequence
cccaccgccatactacctgggca

SEQ ID NO: 796 - DNA, 23 bp, Unknown
  Description of Unknown: gRNA target site sequence
tccttgcagcagttagttcgggg

SEQ ID NO: 797 - DNA, 20 bp, Unknown
  Description of Unknown: gRNA target site sequence
cagtttatttcttgtgattt

SEQ ID NO: 798 - DNA, 20 bp, Unknown
  Description of Unknown: gRNA target site sequence
tctcttaaccaaatgctaaa

SEQ ID NO: 799 - DNA, 20 bp, Unknown
  Description of Unknown: gRNA target site sequence
aaccaaatgctaaatggatt

SEQ ID NO: 800 - DNA, 20 bp, Unknown
  Description of Unknown: gRNA target site sequence
accaaatgctaaatggattt

SEQ ID NO: 801 - DNA, 20 bp, Unknown
  Description of Unknown: gRNA target site sequence
caaatgctaaatggatttag

SEQ ID NO: 802 - DNA, 20 bp, Unknown
  Description of Unknown: gRNA target site sequence
gagaaataaacttatttgta

SEQ ID NO: 803 - DNA, 20 bp, Unknown
  Description of Unknown: gRNA target site sequence
aacttatttgtaaagctgtc

SEQ ID NO: 804 - DNA, 20 bp, Unknown
  Description of Unknown: gRNA target site sequence
acttatttgtaaagctgtca

SEQ ID NO: 805 - DNA, 20 bp, Unknown
  Description of Unknown: gRNA target site sequence
cttatttgtaaagctgtcaa

SEQ ID NO: 806 - DNA, 20 bp, Unknown
  Description of Unknown: gRNA target site sequence
taaagctgtcaagggaccat

SEQ ID NO: 807 - DNA, 20 bp, Unknown
  Description of Unknown: gRNA target site sequence
agctgtcaagggaccattag

SEQ ID NO: 808 - DNA, 20 bp, Unknown
  Description of Unknown: gRNA target site sequence
gctgtcaagggaccattaga

SEQ ID NO: 809 - DNA, 20 bp, Unknown
  Description of Unknown: gRNA target site sequence
tcaagggaccattagaagga

SEQ ID NO: 810 - DNA, 20 bp, Unknown
  Description of Unknown: gRNA target site sequence
attagaaggatggtgcttca

SEQ ID NO: 811 - DNA, 20 bp, Unknown
  Description of Unknown: gRNA target site sequence
gaaggatggtgcttcacaga

SEQ ID NO: 812 - DNA, 20 bp, Unknown
  Description of Unknown: gRNA target site sequence
ggtgcttcacagatagaata

SEQ ID NO: 813 - DNA, 20 bp, Unknown
  Description of Unknown: gRNA target site sequence
cagtttttattaatgatgcc

SEQ ID NO: 814 - DNA, 20 bp, Unknown
  Description of Unknown: gRNA target site sequence
gcctagacaaatcctgccat

SEQ ID NO: 815 - DNA, 20 bp, Unknown
  Description of Unknown: gRNA target site sequence
acaaatcctgccattagccc

SEQ ID NO: 816 - DNA, 20 bp, Unknown
  Description of Unknown: gRNA target site sequence
caaatcctgccattagccca

SEQ ID NO: 817 - DNA, 20 bp, Unknown
  Description of Unknown: gRNA target site sequence
aaatcctgccattagcccaa

SEQ ID NO: 818 - DNA, 20 bp, Unknown
  Description of Unknown: gRNA target site sequence
ctgccattagcccaagggct

SEQ ID NO: 819 - DNA, 20 bp, Unknown
  Description of Unknown: gRNA target site sequence
cattagcccaagggctcaga

SEQ ID NO: 820 - DNA, 20 bp, Unknown
  Description of Unknown: gRNA target site sequence
agcccaagggctcagaaagt

SEQ ID NO: 821 - DNA, 20 bp, Unknown
  Description of Unknown: gRNA target site sequence
ccaagggctcagaaagttag

SEQ ID NO: 822 - DNA, 20 bp, Unknown
  Description of Unknown: gRNA target site sequence
ggctcagaaagttagcagcc

SEQ ID NO: 823 - DNA, 20 bp, Unknown
  Description of Unknown: gRNA target site sequence
tcagaaagttagcagcctag

SEQ ID NO: 824 - DNA, 20 bp, Unknown
  Description of Unknown: gRNA target site sequence
agttagcagcctagtagttt

SEQ ID NO: 825 - DNA, 20 bp, Unknown
  Description of Unknown: gRNA target site sequence
ttagcagcctagtagttttg

SEQ ID NO: 826 - DNA, 20 bp, Unknown
  Description of Unknown: gRNA target site sequence
gagttgtcaatgaaatgaat

SEQ ID NO: 827 - DNA, 20 bp, Unknown
  Description of Unknown: gRNA target site sequence
gtcaatgaaatgaattggac

SEQ ID NO: 828 - DNA, 20 bp, Unknown
  Description of Unknown: gRNA target site sequence
atgaaatgaattggactgga

SEQ ID NO: 829 - DNA, 20 bp, Unknown
  Description of Unknown: gRNA target site sequence
atgaattggactggatggtt

SEQ ID NO: 830 - DNA, 20 bp, Unknown
  Description of Unknown: gRNA target site sequence
tgaattggactggatggtta

SEQ ID NO: 831 - DNA, 20 bp, Unknown
  Description of Unknown: gRNA target site sequence
actggatggttaaggatgcc

SEQ ID NO: 832 - DNA, 20 bp, Unknown
  Description of Unknown: gRNA target site sequence
ggatggttaaggatgcccag

SEQ ID NO: 833 - DNA, 20 bp, Unknown
  Description of Unknown: gRNA target site sequence
cccagaagattgaataaaat

SEQ ID NO: 834 - DNA, 20 bp, Unknown
  Description of Unknown: gRNA target site sequence
ccagaagattgaataaaatt

SEQ ID NO: 835 - DNA, 20 bp, Unknown
  Description of Unknown: gRNA target site sequence
gattgaataaaattgggatt

SEQ ID NO: 836 - DNA, 20 bp, Unknown
  Description of Unknown: gRNA target site sequence
attgaataaaattgggattt

SEQ ID NO: 837 - DNA, 20 bp, Unknown
  Description of Unknown: gRNA target site sequence
tgaataaaattgggatttag

SEQ ID NO: 838 - DNA, 20 bp, Unknown
  Description of Unknown: gRNA target site sequence
gaataaaattgggatttagg

SEQ ID NO: 839 - DNA, 20 bp, Unknown
  Description of Unknown: gRNA target site sequence
ttaggaggacccttgtactc

SEQ ID NO: 840 - DNA, 20 bp, Unknown
  Description of Unknown: gRNA target site sequence
taggaggacccttgtactcc

SEQ ID NO: 841 - DNA, 20 bp, Unknown
  Description of Unknown: gRNA target site sequence
tgtactccaggaaattctcc

SEQ ID NO: 842 - DNA, 20 bp, Unknown
  Description of Unknown: gRNA target site sequence
aaattctccaagtctccact

SEQ ID NO: 843 - DNA, 20 bp, Unknown
  Description of Unknown: gRNA target site sequence
caagtctccacttagttatc

SEQ ID NO: 844 - DNA, 20 bp, Unknown
  Description of Unknown: gRNA target site sequence
cttagttatccagatcctca

SEQ ID NO: 845 - DNA, 20 bp, Unknown
  Description of Unknown: gRNA target site sequence
agatcctcaaagtgaacatg

SEQ ID NO: 846 - DNA, 20 bp, Unknown
  Description of Unknown: gRNA target site sequence
tcaaagtgaacatgaagctt

SEQ ID NO: 847 - DNA, 20 bp, Unknown
  Description of Unknown: gRNA target site sequence
ttgaatacattttccatcca

SEQ ID NO: 848 - DNA, 20 bp, Unknown
  Description of Unknown: gRNA target site sequence
tacattttccatccatggat

SEQ ID NO: 849 - DNA, 20 bp, Unknown
  Description of Unknown: gRNA target site sequence
atggattggcttgttttgtt

SEQ ID NO: 850 - DNA, 20 bp, Unknown
  Description of Unknown: gRNA target site sequence
ttggcttgttttgttcagtt

SEQ ID NO: 851 - DNA, 20 bp, Unknown
  Description of Unknown: gRNA target site sequence
ttttgttcagttgagtgctt

SEQ ID NO: 852 - DNA, 20 bp, Unknown
  Description of Unknown: gRNA target site sequence
tttgttcagttgagtgcttg

SEQ ID NO: 853 - DNA, 20 bp, Unknown
  Description of Unknown: gRNA target site sequence
aggttgtcttttcgacgtaa

SEQ ID NO: 854 - DNA, 20 bp, Unknown
  Description of Unknown: gRNA target site sequence
cgacgtaacagctaaaccca

SEQ ID NO: 855 - DNA, 20 bp, Unknown
  Description of Unknown: gRNA target site sequence
tctcgtaaaaccaaaacaaa

SEQ ID NO: 856 - DNA, 20 bp, Unknown
  Description of Unknown: gRNA target site sequence
ctcgtaaaaccaaaacaaaa

SEQ ID NO: 857 - DNA, 20 bp, Unknown
  Description of Unknown: gRNA target site sequence
aacaaaaaggctttctattc

SEQ ID NO: 858 - DNA, 20 bp, Unknown
  Description of Unknown: gRNA target site sequence
gcacatgtgtaatacatatc

SEQ ID NO: 859 - DNA, 20 bp, Unknown
  Description of Unknown: gRNA target site sequence
cacatgtgtaatacatatct

SEQ ID NO: 860 - DNA, 20 bp, Unknown
  Description of Unknown: gRNA target site sequence
gtaatacatatctgggatca

SEQ ID NO: 861 - DNA, 20 bp, Unknown
  Description of Unknown: gRNA target site sequence
ggatcaaagctatctatata

SEQ ID NO: 862 - DNA, 20 bp, Unknown
  Description of Unknown: gRNA target site sequence
ataaagtccttgattctgtg

SEQ ID NO: 863 - DNA, 20 bp, Unknown
  Description of Unknown: gRNA target site sequence
taaagtccttgattctgtgt

SEQ ID NO: 864 - DNA, 20 bp, Unknown
  Description of Unknown: gRNA target site sequence
gtgggttcaaacacatttca

SEQ ID NO: 865 - DNA, 20 bp, Unknown
  Description of Unknown: gRNA target site sequence
tcaaacacatttcaaagctt

SEQ ID NO: 866 - DNA, 20 bp, Unknown
  Description of Unknown: gRNA target site sequence
caaacacatttcaaagcttc

SEQ ID NO: 867 - DNA, 20 bp, Unknown
  Description of Unknown: gRNA target site sequence
tcaaagcttcaggatcctga

SEQ ID NO: 868 - DNA, 20 bp, Unknown
  Description of Unknown: gRNA target site sequence
caaagcttcaggatcctgaa

SEQ ID NO: 869 - DNA, 20 bp, Unknown
  Description of Unknown: gRNA target site sequence
aggttttgctctacttcctg

SEQ ID NO: 870 - DNA, 20 bp, Unknown
  Description of Unknown: gRNA target site sequence
acctgaacaccgctcccata

SEQ ID NO: 871 - DNA, 20 bp, Unknown
  Description of Unknown: gRNA target site sequence
acaccgctcccataaagcca

SEQ ID NO: 872 - DNA, 20 bp, Unknown
  Description of Unknown: gRNA target site sequence
cataaagccatggcttgcct

SEQ ID NO: 873 - DNA, 20 bp, Unknown
  Description of Unknown: gRNA target site sequence
ccatggcttgccttggattt

SEQ ID NO: 874 - DNA, 20 bp, Unknown
  Description of Unknown: gRNA target site sequence
tggcttgccttggatttcag

SEQ ID NO: 875 - DNA, 20 bp, Unknown
  Description of Unknown: gRNA target site sequence
gccttggatttcagcggcac

SEQ ID NO: 876 - DNA, 20 bp, Unknown
  Description of Unknown: gRNA target site sequence
ccttggatttcagcggcaca

SEQ ID NO: 877 - DNA, 20 bp, Unknown
  Description of Unknown: gRNA target site sequence
gatttcagcggcacaaggct

SEQ ID NO: 878 - DNA, 20 bp, Unknown
  Description of Unknown: gRNA target site sequence
gcacaaggctcagctgaacc

SEQ ID NO: 879 - DNA, 20 bp, Unknown
  Description of Unknown: gRNA target site sequence
gctcagctgaacctggctac

SEQ ID NO: 880 - DNA, 20 bp, Unknown
  Description of Unknown: gRNA target site sequence
ctcagctgaacctggctacc

SEQ ID NO: 881 - DNA, 20 bp, Unknown
  Description of Unknown: gRNA target site sequence
tgaacctggctaccaggacc

SEQ ID NO: 882 - DNA, 20 bp, Unknown
  Description of Unknown: gRNA target site sequence
cttcatccctgtcttctgca

SEQ ID NO: 883 - DNA, 20 bp, Unknown
  Description of Unknown: gRNA target site sequence
ttcatccctgtcttctgcaa

SEQ ID NO: 884 - DNA, 20 bp, Unknown
  Description of Unknown: gRNA target site sequence
tccctgtcttctgcaaaggt

SEQ ID NO: 885 - DNA, 20 bp, Unknown
  Description of Unknown: gRNA target site sequence
tgtcttctgcaaaggtgagt

SEQ ID NO: 886 - DNA, 20 bp, Unknown
  Description of Unknown: gRNA target site sequence
gcaaaggtgagtgagacttt

SEQ ID NO: 887 - DNA, 20 bp, Unknown
  Description of Unknown: gRNA target site sequence
aaaggtgagtgagacttttg

SEQ ID NO: 888 - DNA, 20 bp, Unknown
  Description of Unknown: gRNA target site sequence
agtgagacttttggagcatg

SEQ ID NO: 889 - DNA, 20 bp, Unknown
  Description of Unknown: gRNA target site sequence
agacttttggagcatgaaga

SEQ ID NO: 890 - DNA, 20 bp, Unknown
  Description of Unknown: gRNA target site sequence
acttttggagcatgaagatg

SEQ ID NO: 891 - DNA, 20 bp, Unknown
  Description of Unknown: gRNA target site sequence
cttttggagcatgaagatgg

SEQ ID NO: 892 - DNA, 20 bp, Unknown
  Description of Unknown: gRNA target site sequence
tttggagcatgaagatggag

SEQ ID NO: 893 - DNA, 20 bp, Unknown
  Description of Unknown: gRNA target site sequence
ttggagcatgaagatggagg

SEQ ID NO: 894 - DNA, 20 bp, Unknown
  Description of Unknown: gRNA target site sequence
gaggaggtgtttctcctacc

SEQ ID NO: 895 - DNA, 20 bp, Unknown
  Description of Unknown: gRNA target site sequence
aggaggtgtttctcctacct

SEQ ID NO: 896 - DNA, 20 bp, Unknown
  Description of Unknown: gRNA target site sequence
tacctgggtttcatttgttt

SEQ ID NO: 897 - DNA, 20 bp, Unknown
  Description of Unknown: gRNA target site sequence
ctgggtttcatttgtttcag

SEQ ID NO: 898 - DNA, 20 bp, Unknown
  Description of Unknown: gRNA target site sequence
ttcatttgtttcagcagtca

SEQ ID NO: 899 - DNA, 20 bp, Unknown
  Description of Unknown: gRNA target site sequence
tcatttgtttcagcagtcaa

SEQ ID NO: 900 - DNA, 20 bp, Unknown
  Description of Unknown: gRNA target site sequence
tttgtttcagcagtcaaagg

SEQ ID NO: 901 - DNA, 20 bp, Unknown
  Description of Unknown: gRNA target site sequence
cagtcaaaggcagtgattta

SEQ ID NO: 902 - DNA, 20 bp, Unknown
  Description of Unknown: gRNA target site sequence
aaaggcagtgatttatagca

SEQ ID NO: 903 - DNA, 20 bp, Unknown
  Description of Unknown: gRNA target site sequence
gcagtgatttatagcaaagc

SEQ ID NO: 904 - DNA, 20 bp, Unknown
  Description of Unknown: gRNA target site sequence
gtgatttatagcaaagccag

SEQ ID NO: 905 - DNA, 20 bp, Unknown
  Description of Unknown: gRNA target site sequence
tatagcaaagccagaagtta

SEQ ID NO: 906 - DNA, 20 bp, Unknown
  Description of Unknown: gRNA target site sequence
atagcaaagccagaagttaa

SEQ ID NO: 907 - DNA, 20 bp, Unknown
  Description of Unknown: gRNA target site sequence
ttaaaggtaaaactccaatc

SEQ ID NO: 908 - DNA, 20 bp, Unknown
  Description of Unknown: gRNA target site sequence
ggtaaaactccaatctggct

SEQ ID NO: 909 - DNA, 20 bp, Unknown
  Description of Unknown: gRNA target site sequence
aaactccaatctggcttggc

SEQ ID NO: 910 - DNA, 20 bp, Unknown
  Description of Unknown: gRNA target site sequence
gcttggctggctctgtattc

SEQ ID NO: 911 - DNA, 20 bp, Unknown
  Description of Unknown: gRNA target site sequence
cttggctggctctgtattcc

SEQ ID NO: 912 - DNA, 20 bp, Unknown
  Description of Unknown: gRNA target site sequence
ttggctggctctgtattcca

SEQ ID NO: 913 - DNA, 20 bp, Unknown
  Description of Unknown: gRNA target site sequence
ctggctctgtattccagggc

SEQ ID NO: 914 - DNA, 20 bp, Unknown
  Description of Unknown: gRNA target site sequence
gctctgtattccagggccag

SEQ ID NO: 915 - DNA, 20 bp, Unknown
  Description of Unknown: gRNA target site sequence
ctctgtattccagggccagc

SEQ ID NO: 916 - DNA, 20 bp, Unknown
  Description of Unknown: gRNA target site sequence
tctgtattccagggccagca

SEQ ID NO: 917 - DNA, 20 bp, Unknown
  Description of Unknown: gRNA target site sequence
tgtattccagggccagcagg

SEQ ID NO: 918 - DNA, 20 bp, Unknown
  Description of Unknown: gRNA target site sequence
attccagggccagcagggag

SEQ ID NO: 919 - DNA, 20 bp, Unknown
  Description of Unknown: gRNA target site sequence
cagggccagcagggagcagt

SEQ ID NO: 920 - DNA, 20 bp, Unknown
  Description of Unknown: gRNA target site sequence
agggccagcagggagcagtt

SEQ ID NO: 921 - DNA, 20 bp, Unknown
  Description of Unknown: gRNA target site sequence
gccagcagggagcagttggg

SEQ ID NO: 922 - DNA, 20 bp, Unknown
  Description of Unknown: gRNA target site sequence
agcagggagcagttgggcgg

SEQ ID NO: 923 - DNA, 20 bp, Unknown
  Description of Unknown: gRNA target site sequence
gcagttgggcggcagcaaat

SEQ ID NO: 924 - DNA, 20 bp, Unknown
  Description of Unknown: gRNA target site sequence
cagttgggcggcagcaaata

SEQ ID NO: 925 - DNA, 20 bp, Unknown
  Description of Unknown: gRNA target site sequence
gggcggcagcaaataaggca

SEQ ID NO: 926 - DNA, 20 bp, Unknown
  Description of Unknown: gRNA target site sequence
gcggcagcaaataaggcaaa

SEQ ID NO: 927 - DNA, 20 bp, Unknown
  Description of Unknown: gRNA target site sequence
cagcaaataaggcaaagaga

SEQ ID NO: 928 - DNA, 20 bp, Unknown
  Description of Unknown: gRNA target site sequence
aataaggcaaagagatagct

SEQ ID NO: 929 - DNA, 20 bp, Unknown
  Description of Unknown: gRNA target site sequence
ggcaaagagatagctcagaa

SEQ ID NO: 930 - DNA, 20 bp, Unknown
  Description of Unknown: gRNA target site sequence
caaagagatagctcagaaca

SEQ ID NO: 931 - DNA, 20 bp, Unknown
  Description of Unknown: gRNA target site sequence
gatagctcagaacagagcgc

SEQ ID NO: 932 - DNA, 20 bp, Unknown
  Description of Unknown: gRNA target site sequence
atagctcagaacagagcgcc

SEQ ID NO: 933 - DNA, 20 bp, Unknown
  Description of Unknown: gRNA target site sequence
agaacagagcgccaggtatt

SEQ ID NO: 934 - DNA, 20 bp, Unknown
  Description of Unknown: gRNA target site sequence
acagagcgccaggtatttag

SEQ ID NO: 935 - DNA, 20 bp, Unknown
  Description of Unknown: gRNA target site sequence
cagagcgccaggtatttagt

SEQ ID NO: 936 - DNA, 20 bp, Unknown
  Description of Unknown: gRNA target site sequence
agagcgccaggtatttagta

SEQ ID NO: 937 - DNA, 20 bp, Unknown
  Description of Unknown: gRNA target site sequence
gagcgccaggtatttagtag

SEQ ID NO: 938 - DNA, 20 bp, Unknown
  Description of Unknown: gRNA target site sequence
ggggcttcatgaatgcatgt

SEQ ID NO: 939 - DNA, 20 bp, Unknown
  Description of Unknown: gRNA target site sequence
cttcatgaatgcatgtgagt

SEQ ID NO: 940 - DNA, 20 bp, Unknown
  Description of Unknown: gRNA target site sequence
tgaatgcatgtgagttggtt

SEQ ID NO: 941 - DNA, 20 bp, Unknown
  Description of Unknown: gRNA target site sequence
atgcatgtgagttggtttag

SEQ ID NO: 942 - DNA, 20 bp, Unknown
  Description of Unknown: gRNA target site sequence
gcatgtgagttggtttagta

SEQ ID NO: 943 - DNA, 20 bp, Unknown
  Description of Unknown: gRNA target site sequence
atgtgagttggtttagtaga

SEQ ID NO: 944 - DNA, 20 bp, Unknown
  Description of Unknown: gRNA target site sequence
gttggtttagtagagagaca

SEQ ID NO: 945 - DNA, 20 bp, Unknown
  Description of Unknown: gRNA target site sequence
ttggtttagtagagagacac

SEQ ID NO: 946 - DNA, 20 bp, Unknown
  Description of Unknown: gRNA target site sequence
tagagagacacaggcaattt

SEQ ID NO: 947 - DNA, 20 bp, Unknown
  Description of Unknown: gRNA target site sequence
gcaatttcagacccttctat

SEQ ID NO: 948 - DNA, 20 bp, Unknown
  Description of Unknown: gRNA target site sequence
ttcagacccttctatgagac

SEQ ID NO: 949 - DNA, 20 bp, Unknown
  Description of Unknown: gRNA target site sequence
agacccttctatgagactgg

SEQ ID NO: 950 - DNA, 20 bp, Unknown
  Description of Unknown: gRNA target site sequence
tatgagactggaagtgattt

SEQ ID NO: 951 - DNA, 20 bp, Unknown
  Description of Unknown: gRNA target site sequence
tgagactggaagtgatttaa

SEQ ID NO: 952 - DNA, 20 bp, Unknown
  Description of Unknown: gRNA target site sequence
gagactggaagtgatttaag

SEQ ID NO: 953 - DNA, 20 bp, Unknown
  Description of Unknown: gRNA target site sequence
agactggaagtgatttaaga

SEQ ID NO: 954 - DNA, 20 bp, Unknown
  Description of Unknown: gRNA target site sequence
tggaagtgatttaagaggga

SEQ ID NO: 955 - DNA, 20 bp, Unknown
  Description of Unknown: gRNA target site sequence
ggaagtgatttaagagggaa

SEQ ID NO: 956 - DNA, 20 bp, Unknown
  Description of Unknown: gRNA target site sequence
gtgatttaagagggaaagga

SEQ ID NO: 957 - DNA, 20 bp, Unknown
  Description of Unknown: gRNA target site sequence
taagagggaaaggatagcca

SEQ ID NO: 958 - DNA, 20 bp, Unknown
  Description of Unknown: gRNA target site sequence
ccatagtcctgaatacattt

SEQ ID NO: 959 - DNA, 20 bp, Unknown
  Description of Unknown: gRNA target site sequence
agtcctgaatacatttgagc

SEQ ID NO: 960 - DNA, 20 bp, Unknown
  Description of Unknown: gRNA target site sequence
gtcctgaatacatttgagct

SEQ ID NO: 961 - DNA, 20 bp, Unknown
  Description of Unknown: gRNA target site sequence
aatacatttgagctgggttt

SEQ ID NO: 962 - DNA, 20 bp, Unknown
  Description of Unknown: gRNA target site sequence
atacatttgagctgggtttc

SEQ ID NO: 963 - DNA, 20 bp, Unknown
  Description of Unknown: gRNA target site sequence
tttgagctgggtttcaggat

SEQ ID NO: 964 - DNA, 20 bp, Unknown
  Description of Unknown: gRNA target site sequence
gggtttcaggatgagctcac

SEQ ID NO: 965 - DNA, 20 bp, Unknown
  Description of Unknown: gRNA target site sequence
cctttaaaaaaaattgactt

SEQ ID NO: 966 - DNA, 20 bp, Unknown
  Description of Unknown: gRNA target site sequence
aaattgacttaagcaaatcc

SEQ ID NO: 967 - DNA, 20 bp, Unknown
  Description of Unknown: gRNA target site sequence
aattgacttaagcaaatcct

SEQ ID NO: 968 - DNA, 20 bp, Unknown
  Description of Unknown: gRNA target site sequence
tgacttaagcaaatcctggg

SEQ ID NO: 969 - DNA, 20 bp, Unknown
  Description of Unknown: gRNA target site sequence
acttaagcaaatcctgggaa

SEQ ID NO: 970 - DNA, 20 bp, Unknown
  Description of Unknown: gRNA target site sequence
gtttttttgctatacaattc

SEQ ID NO: 971 - DNA, 20 bp, Unknown
  Description of Unknown: gRNA target site sequence
tttttttgctatacaattca

SEQ ID NO: 972 - DNA, 20 bp, Unknown
  Description of Unknown: gRNA target site sequence
gctatacaattcaaggtttt

SEQ ID NO: 973 - DNA, 20 bp, Unknown
  Description of Unknown: gRNA target site sequence
ctatacaattcaaggtttta

SEQ ID NO: 974 - DNA, 20 bp, Unknown
  Description of Unknown: gRNA target site sequence
attcaaggttttaaggtcct

SEQ ID NO: 975 - DNA, 20 bp, Unknown
  Description of Unknown: gRNA target site sequence
catatactttataaatgaat

SEQ ID NO: 976 - DNA, 20 bp, Unknown
  Description of Unknown: gRNA target site sequence
tactttataaatgaattagc

SEQ ID NO: 977 - DNA, 20 bp, Unknown
  Description of Unknown: gRNA target site sequence
tagccagcttgtttaaaatg

SEQ ID NO: 978 - DNA, 20 bp, Unknown
  Description of Unknown: gRNA target site sequence
agccagcttgtttaaaatgt

SEQ ID NO: 979 - DNA, 20 bp, Unknown
  Description of Unknown: gRNA target site sequence
gccagcttgtttaaaatgta

SEQ ID NO: 980 - DNA, 20 bp, Unknown
  Description of Unknown: gRNA target site sequence
tttaaaatgtagggaaattg

SEQ ID NO: 981 - DNA, 20 bp, Unknown
  Description of Unknown: gRNA target site sequence
ttaaaatgtagggaaattgt

SEQ ID NO: 982 - DNA, 20 bp, Unknown
  Description of Unknown: gRNA target site sequence
aaatgtagggaaattgtggg

SEQ ID NO: 983 - DNA, 20 bp, Unknown
  Description of Unknown: gRNA target site sequence
atgccttctttacttaattc

SEQ ID NO: 984 - DNA, 20 bp, Unknown
  Description of Unknown: gRNA target site sequence
tgccttctttacttaattca

SEQ ID NO: 985 - DNA, 20 bp, Unknown
  Description of Unknown: gRNA target site sequence
tttacttaattcaaggtttt

SEQ ID NO: 986 - DNA, 20 bp, Unknown
  Description of Unknown: gRNA target site sequence
ttacttaattcaaggtttta

SEQ ID NO: 987 - DNA, 20 bp, Unknown
  Description of Unknown: gRNA target site sequence
gttctcttaatcaattctac

SEQ ID NO: 988 - DNA, 20 bp, Unknown
  Description of Unknown: gRNA target site sequence
aatcaattctactagctaat

SEQ ID NO: 989 - DNA, 20 bp, Unknown
  Description of Unknown: gRNA target site sequence
agccaattatttaaaaataa

SEQ ID NO: 990 - DNA, 20 bp, Unknown
  Description of Unknown: gRNA target site sequence
tttgaaattgccaaaaaaaa

SEQ ID NO: 991 - DNA, 20 bp, Unknown
  Description of Unknown: gRNA target site sequence
aattgccaaaaaaaaaagac

SEQ ID NO: 992 - DNA, 20 bp, Unknown
  Description of Unknown: gRNA target site sequence
attgccaaaaaaaaaagaca

SEQ ID NO: 993 - DNA, 20 bp, Unknown
  Description of Unknown: gRNA target site sequence
caaaaaaaaaagacaaggaa

SEQ ID NO: 994 - DNA, 20 bp, Unknown
  Description of Unknown: gRNA target site sequence
aaaaaaaaaagacaaggaaa

SEQ ID NO: 995 - DNA, 20 bp, Unknown
  Description of Unknown: gRNA target site sequence
aaaaaagacaaggaaaagga

SEQ ID NO: 996 - DNA, 20 bp, Unknown
  Description of Unknown: gRNA target site sequence
aagacaaggaaaaggaaaga

SEQ ID NO: 997 - DNA, 20 bp, Unknown
  Description of Unknown: gRNA target site sequence
caaggaaaaggaaagaaaga

SEQ ID NO: 998 - DNA, 20 bp, Unknown
  Description of Unknown: gRNA target site sequence
aaggaaagaaagaaagccac

SEQ ID NO: 999 - DNA, 20 bp, Unknown
  Description of Unknown: gRNA target site sequence
aagaaagccaccagtctgtt

SEQ ID NO: 1000 - DNA, 20 bp, Unknown
  Description of Unknown: gRNA target site sequence
attgttgcctgacctacgtg

SEQ ID NO: 1001 - DNA, 20 bp, Unknown
  Description of Unknown: gRNA target site sequence
ttgttgcctgacctacgtgt

SEQ ID NO: 1002 - DNA, 20 bp, Unknown
  Description of Unknown: gRNA target site sequence
cctgacctacgtgtgggttt

SEQ ID NO: 1003 - DNA, 20 bp, Unknown
  Description of Unknown: gRNA target site sequence
ctacgtgtgggtttcagatg

SEQ ID NO: 1004 - DNA, 20 bp, Unknown
  Description of Unknown: gRNA target site sequence
gggtttcagatgcagatcct

SEQ ID NO: 1005 - DNA, 20 bp, Unknown
  Description of Unknown: gRNA target site sequence
agatgcagatcctcagtttt

SEQ ID NO: 1006 - DNA, 20 bp, Unknown
  Description of Unknown: gRNA target site sequence
atcctcagttttcagctctt

SEQ ID NO: 1007 - DNA, 20 bp, Unknown
  Description of Unknown: gRNA target site sequence
cctcagttttcagctcttca

SEQ ID NO: 1008 - DNA, 20 bp, Unknown
  Description of Unknown: gRNA target site sequence
agctcttcagagactgacac

SEQ ID NO: 1009 - DNA, 20 bp, Unknown
  Description of Unknown: gRNA target site sequence
gctcttcagagactgacacc

SEQ ID NO: 1010 - DNA, 20 bp, Unknown
  Description of Unknown: gRNA target site sequence
ctgacaccaggtttgttaca

SEQ ID NO: 1011 - DNA, 20 bp, Unknown
  Description of Unknown: gRNA target site sequence
gttacacggcttaaaatgat

SEQ ID NO: 1012 - DNA, 20 bp, Unknown
  Description of Unknown: gRNA target site sequence
atctcaaccttatctctctc

SEQ ID NO: 1013 - DNA, 20 bp, Unknown
  Description of Unknown: gRNA target site sequence
tatctctctctagaccttct

SEQ ID NO: 1014 - DNA, 20 bp, Unknown
  Description of Unknown: gRNA target site sequence
ctctctagaccttcttggtt

SEQ ID NO: 1015 - DNA, 20 bp, Unknown
  Description of Unknown: gRNA target site sequence
ttcttggttaagaaaccatg

SEQ ID NO: 1016 - DNA, 20 bp, Unknown
  Description of Unknown: gRNA target site sequence
gaaaccatgtagtttgtatg

SEQ ID NO: 1017 - DNA, 20 bp, Unknown
  Description of Unknown: gRNA target site sequence
accatgtagtttgtatgaag

SEQ ID NO: 1018 - DNA, 20 bp, Unknown
  Description of Unknown: gRNA target site sequence
ccatgtagtttgtatgaagt

SEQ ID NO: 1019 - DNA, 20 bp, Unknown
  Description of Unknown: gRNA target site sequence
tgtatgaagtaggtactcaa

SEQ ID NO: 1020 - DNA, 20 bp, Unknown
  Description of Unknown: gRNA target site sequence
tttgatgatttaatttttac

SEQ ID NO: 1021 - DNA, 20 bp, Unknown
  Description of Unknown: gRNA target site sequence
tgatgatttaatttttactg

SEQ ID NO: 1022 - DNA, 20 bp, Unknown
  Description of Unknown: gRNA target site sequence
tgatttaatttttactggag

SEQ ID NO: 1023 - DNA, 20 bp, Unknown
  Description of Unknown: gRNA target site sequence
ttacatgttttaaatatgta

SEQ ID NO: 1024 - DNA, 20 bp, Unknown
  Description of Unknown: gRNA target site sequence
aaagattaaataaacactct

SEQ ID NO: 1025 - DNA, 20 bp, Unknown
  Description of Unknown: gRNA target site sequence
gattaaataaacactcttag

SEQ ID NO: 1026 - DNA, 20 bp, Unknown
  Description of Unknown: gRNA target site sequence
agaagtatttaaatttccta

SEQ ID NO: 1027 - DNA, 20 bp, Unknown
  Description of Unknown: gRNA target site sequence
taaagtaaatttatctcaac

SEQ ID NO: 1028 - DNA, 20 bp, Unknown
  Description of Unknown: gRNA target site sequence
aaatttatctcaaccagtaa

SEQ ID NO: 1029 - DNA, 20 bp, Unknown
  Description of Unknown: gRNA target site sequence
aatttatctcaaccagtaac

SEQ ID NO: 1030 - DNA, 20 bp, Unknown
  Description of Unknown: gRNA target site sequence
taacaggaccctcccaatac

SEQ ID NO: 1031 - DNA, 20 bp, Unknown
  Description of Unknown: gRNA target site sequence
aggaccctcccaatactgga

SEQ ID NO: 1032 - DNA, 20 bp, Unknown
  Description of Unknown: gRNA target site sequence
cctcccaatactggaaagtt

SEQ ID NO: 1033 - DNA, 20 bp, Unknown
  Description of Unknown: gRNA target site sequence
aagttgagtgtgaccgcatt

SEQ ID NO: 1034 - DNA, 20 bp, Unknown
  Description of Unknown: gRNA target site sequence
ttgagtgtgaccgcatttag

SEQ ID NO: 1035 - DNA, 20 bp, Unknown
  Description of Unknown: gRNA target site sequence
tgaccgcatttagtggtgat

SEQ ID NO: 1036 - DNA, 20 bp, Unknown
  Description of Unknown: gRNA target site sequence
catttagtggtgatgagtgt

SEQ ID NO: 1037 - DNA, 20 bp, Unknown
  Description of Unknown: gRNA target site sequence
gtgatgagtgtgagcttgct

SEQ ID NO: 1038 - DNA, 20 bp, Unknown
  Description of Unknown: gRNA target site sequence
tgatgagtgtgagcttgctt

SEQ ID NO: 1039 - DNA, 20 bp, Unknown
  Description of Unknown: gRNA target site sequence
gatgagtgtgagcttgcttg

SEQ ID NO: 1040 - DNA, 20 bp, Unknown
  Description of Unknown: gRNA target site sequence
tgagtgtgagcttgcttggg

SEQ ID NO: 1041 - DNA, 20 bp, Unknown
  Description of Unknown: gRNA target site sequence
agtgtgagcttgcttgggga

SEQ ID NO: 1042 - DNA, 20 bp, Unknown
  Description of Unknown: gRNA target site sequence
gtgtgagcttgcttggggag

SEQ ID NO: 1043 - DNA, 20 bp, Unknown
  Description of Unknown: gRNA target site sequence
tgtgagcttgcttggggaga

SEQ ID NO: 1044 - DNA, 20 bp, Unknown
  Description of Unknown: gRNA target site sequence
gagcttgcttggggagaggg

SEQ ID NO: 1045 - DNA, 20 bp, Unknown
  Description of Unknown: gRNA target site sequence
agcttgcttggggagagggc

SEQ ID NO: 1046 - DNA, 20 bp, Unknown
  Description of Unknown: gRNA target site sequence
tggggagagggcaggacatt

SEQ ID NO: 1047 - DNA, 20 bp, Unknown
  Description of Unknown: gRNA target site sequence
ggggagagggcaggacattt

SEQ ID NO: 1048 - DNA, 20 bp, Unknown
  Description of Unknown: gRNA target site sequence
caggacatttaggatttctt

SEQ ID NO: 1049 - DNA, 20 bp, Unknown
  Description of Unknown: gRNA target site sequence
catttaggatttcttaagct

SEQ ID NO: 1050 - DNA, 20 bp, Unknown
  Description of Unknown: gRNA target site sequence
tttaggatttcttaagctta

SEQ ID NO: 1051 - DNA, 20 bp, Unknown
  Description of Unknown: gRNA target site sequence
agcttagagtcaatacaata

SEQ ID NO: 1052 - DNA, 20 bp, Unknown
  Description of Unknown: gRNA target site sequence
tcaatacaataaagattatt

SEQ ID NO: 1053 - DNA, 20 bp, Unknown
  Description of Unknown: gRNA target site sequence
aagattattgagtgctcact

SEQ ID NO: 1054 - DNA, 20 bp, Unknown
  Description of Unknown: gRNA target site sequence
agattattgagtgctcactt

SEQ ID NO: 1055 - DNA, 20 bp, Unknown
  Description of Unknown: gRNA target site sequence
ttattgagtgctcacttggg

SEQ ID NO: 1056 - DNA, 20 bp, Unknown
  Description of Unknown: gRNA target site sequence
tattgagtgctcacttgggt

SEQ ID NO: 1057 - DNA, 20 bp, Unknown
  Description of Unknown: gRNA target site sequence
tgggctataatcactgctca

SEQ ID NO: 1058 - DNA, 20 bp, Unknown
  Description of Unknown: gRNA target site sequence
gggctataatcactgctcac

SEQ ID NO: 1059 - DNA, 20 bp, Unknown
  Description of Unknown: gRNA target site sequence
gctataatcactgctcacag

SEQ ID NO: 1060 - DNA, 20 bp, Unknown
  Description of Unknown: gRNA target site sequence
cacaggagttcatgaaccac

SEQ ID NO: 1061 - DNA, 20 bp, Unknown
  Description of Unknown: gRNA target site sequence
agttcatgaaccacaagtaa

SEQ ID NO: 1062 - DNA, 20 bp, Unknown
  Description of Unknown: gRNA target site sequence
ttcatgaaccacaagtaaaa

SEQ ID NO: 1063 - DNA, 20 bp, Unknown
  Description of Unknown: gRNA target site sequence
tgaaccacaagtaaaagagt

SEQ ID NO: 1064 - DNA, 20 bp, Unknown
  Description of Unknown: gRNA target site sequence
gaaccacaagtaaaagagtg

SEQ ID NO: 1065 - DNA, 20 bp, Unknown
  Description of Unknown: gRNA target site sequence
accacaagtaaaagagtgag

SEQ ID NO: 1066 - DNA, 20 bp, Unknown
  Description of Unknown: gRNA target site sequence
aaagagtgaggagatatgat

SEQ ID NO: 1067 - DNA, 20 bp, Unknown
  Description of Unknown: gRNA target site sequence
gctcacaaataactttaata

SEQ ID NO: 1068 - DNA, 20 bp, Unknown
  Description of Unknown: gRNA target site sequence
tcacaaataactttaataca

SEQ ID NO: 1069 - DNA, 20 bp, Unknown
  Description of Unknown: gRNA target site sequence
caaataactttaatacagag

SEQ ID NO: 1070 - DNA, 20 bp, Unknown
  Description of Unknown: gRNA target site sequence
taactttaatacagagcaga

SEQ ID NO: 1071 - DNA, 20 bp, Unknown
  Description of Unknown: gRNA target site sequence
aaagtaatgaactactgcaa

SEQ ID NO: 1072 - DNA, 20 bp, Unknown
  Description of Unknown: gRNA target site sequence
agtaatgaactactgcaatg

SEQ ID NO: 1073 - DNA, 20 bp, Unknown
  Description of Unknown: gRNA target site sequence
ctactgcaatggagttatca

SEQ ID NO: 1074 - DNA, 20 bp, Unknown
  Description of Unknown: gRNA target site sequence
aatggagttatcacagtgct

SEQ ID NO: 1075 - DNA, 20 bp, Unknown
  Description of Unknown: gRNA target site sequence
atggagttatcacagtgcta

SEQ ID NO: 1076 - DNA, 20 bp, Unknown
  Description of Unknown: gRNA target site sequence
atcacagtgctaaggatgct

SEQ ID NO: 1077 - DNA, 20 bp, Unknown
  Description of Unknown: gRNA target site sequence
cacagtgctaaggatgctca

SEQ ID NO: 1078 - DNA, 20 bp, Unknown
  Description of Unknown: gRNA target site sequence
acagtgctaaggatgctcag

SEQ ID NO: 1079 - DNA, 20 bp, Unknown
  Description of Unknown: gRNA target site sequence
cagtgctaaggatgctcaga

SEQ ID NO: 1080 - DNA, 20 bp, Unknown
  Description of Unknown: gRNA target site sequence
tgctcagagggcatctctga

SEQ ID NO: 1081 - DNA, 20 bp, Unknown
  Description of Unknown: gRNA target site sequence
gctcagagggcatctctgat

SEQ ID NO: 1082 - DNA, 20 bp, Unknown
  Description of Unknown: gRNA target site sequence
cagagggcatctctgatagg

SEQ ID NO: 1083 - DNA, 20 bp, Unknown
  Description of Unknown: gRNA target site sequence
gagggcatctctgataggca

SEQ ID NO: 1084 - DNA, 20 bp, Unknown
  Description of Unknown: gRNA target site sequence
agggcatctctgataggcag

SEQ ID NO: 1085 - DNA, 20 bp, Unknown
  Description of Unknown: gRNA target site sequence
catctctgataggcagaggt

SEQ ID NO: 1086 - DNA, 20 bp, Unknown
  Description of Unknown: gRNA target site sequence
atctctgataggcagaggtg

SEQ ID NO: 1087 - DNA, 20 bp, Unknown
  Description of Unknown: gRNA target site sequence
tctctgataggcagaggtga

SEQ ID NO: 1088 - DNA, 20 bp, Unknown
  Description of Unknown: gRNA target site sequence
tgataggcagaggtgagggt

SEQ ID NO: 1089 - DNA, 20 bp, Unknown
  Description of Unknown: gRNA target site sequence
gataggcagaggtgagggtt

SEQ ID NO: 1090 - DNA, 20 bp, Unknown
  Description of Unknown: gRNA target site sequence
ataggcagaggtgagggtta

SEQ ID NO: 1091 - DNA, 20 bp, Unknown
  Description of Unknown: gRNA target site sequence
ggcagaggtgagggttaggg

SEQ ID NO: 1092 - DNA, 20 bp, Unknown
  Description of Unknown: gRNA target site sequence
gcagaggtgagggttaggga

SEQ ID NO: 1093 - DNA, 20 bp, Unknown
  Description of Unknown: gRNA target site sequence
gaggtgagggttagggaagg

SEQ ID NO: 1094 - DNA, 20 bp, Unknown
  Description of Unknown: gRNA target site sequence
agggttagggaaggaagctg

SEQ ID NO: 1095 - DNA, 20 bp, Unknown
  Description of Unknown: gRNA target site sequence
tagggaaggaagctgtagtc

SEQ ID NO: 1096 - DNA, 20 bp, Unknown
  Description of Unknown: gRNA target site sequence
gaaggaagctgtagtctagc

SEQ ID NO: 1097 - DNA, 20 bp, Unknown
  Description of Unknown: gRNA target site sequence
gaagctgtagtctagctagc

SEQ ID NO: 1098 - DNA, 20 bp, Unknown
  Description of Unknown: gRNA target site sequence
agctgtagtctagctagcta

SEQ ID NO: 1099 - DNA, 20 bp, Unknown
  Description of Unknown: gRNA target site sequence
gtctagctagctagagctgc

SEQ ID NO: 1100 - DNA, 20 bp, Unknown
  Description of Unknown: gRNA target site sequence
gctagctagagctgctggaa

SEQ ID NO: 1101 - DNA, 20 bp, Unknown
  Description of Unknown: gRNA target site sequence
tgctggaatagacatgacaa

SEQ ID NO: 1102 - DNA, 20 bp, Unknown
  Description of Unknown: gRNA target site sequence
gccaaactgttttctcttct

SEQ ID NO: 1103 - DNA, 20 bp, Unknown
  Description of Unknown: gRNA target site sequence
ccaaactgttttctcttctg

SEQ ID NO: 1104 - DNA, 20 bp, Unknown
  Description of Unknown: gRNA target site sequence
actgttttctcttctgagga

SEQ ID NO: 1105 - DNA, 20 bp, Unknown
  Description of Unknown: gRNA target site sequence
tgaggacagatgtcccgtgc

SEQ ID NO: 1106 - DNA, 20 bp, Unknown
  Description of Unknown: gRNA target site sequence
ggacagatgtcccgtgcaag

SEQ ID NO: 1107 - DNA, 20 bp, Unknown
  Description of Unknown: gRNA target site sequence
gatgtcccgtgcaagtggct

SEQ ID NO: 1108 - DNA, 20 bp, Unknown
  Description of Unknown: gRNA target site sequence
gtcccgtgcaagtggcttgg

SEQ ID NO: 1109 - DNA, 20 bp, Unknown
  Description of Unknown: gRNA target site sequence
ccgtgcaagtggcttggtgg

SEQ ID NO: 1110 - DNA, 20 bp, Unknown
  Description of Unknown: gRNA target site sequence
cgtgcaagtggcttggtgga

SEQ ID NO: 1111 - DNA, 20 bp, Unknown
  Description of Unknown: gRNA target site sequence
gtgcaagtggcttggtggaa

SEQ ID NO: 1112 - DNA, 20 bp, Unknown
  Description of Unknown: gRNA target site sequence
agtggcttggtggaagggac

SEQ ID NO: 1113 - DNA, 20 bp, Unknown
  Description of Unknown: gRNA target site sequence
agggactagtgtctctaata

SEQ ID NO: 1114 - DNA, 20 bp, Unknown
  Description of Unknown: gRNA target site sequence
gggactagtgtctctaatat

SEQ ID NO: 1115 - DNA, 20 bp, Unknown
  Description of Unknown: gRNA target site sequence
ggactagtgtctctaatata

SEQ ID NO: 1116 - DNA, 20 bp, Unknown
  Description of Unknown: gRNA target site sequence
tctaatatagggtgatttat

SEQ ID NO: 1117 - DNA, 20 bp, Unknown
  Description of Unknown: gRNA target site sequence
aatatagggtgatttataag

SEQ ID NO: 1118 - DNA, 20 bp, Unknown
  Description of Unknown: gRNA target site sequence
atatagggtgatttataagc

SEQ ID NO: 1119 - DNA, 20 bp, Unknown
  Description of Unknown: gRNA target site sequence
agggtgatttataagcagga

SEQ ID NO: 1120 - DNA, 20 bp, Unknown
  Description of Unknown: gRNA target site sequence
ataagcaggaaagtgtgtcc

SEQ ID NO: 1121 - DNA, 20 bp, Unknown
  Description of Unknown: gRNA target site sequence
gaaagtgtgtcctagaaatt

SEQ ID NO: 1122 - DNA, 20 bp, Unknown
  Description of Unknown: gRNA target site sequence
tgtgtcctagaaattcagac

SEQ ID NO: 1123 - DNA, 20 bp, Unknown
  Description of Unknown: gRNA target site sequence
tgtcctagaaattcagacca

SEQ ID NO: 1124 - DNA, 20 bp, Unknown
  Description of Unknown: gRNA target site sequence
agaaattcagaccagagtga

SEQ ID NO: 1125 - DNA, 20 bp, Unknown
  Description of Unknown: gRNA target site sequence
ttcagaccagagtgatagat

SEQ ID NO: 1126 - DNA, 20 bp, Unknown
  Description of Unknown: gRNA target site sequence
ccagagtgatagattggaat

SEQ ID NO: 1127 - DNA, 20 bp, Unknown
  Description of Unknown: gRNA target site sequence
gatagattggaattggatca

SEQ ID NO: 1128 - DNA, 20 bp, Unknown
  Description of Unknown: gRNA target site sequence
atagattggaattggatcat

SEQ ID NO: 1129 - DNA, 20 bp, Unknown
  Description of Unknown: gRNA target site sequence
tagattggaattggatcatg

SEQ ID NO: 1130 - DNA, 20 bp, Unknown
  Description of Unknown: gRNA target site sequence
agattggaattggatcatgg

SEQ ID NO: 1131 - DNA, 20 bp, Unknown
  Description of Unknown: gRNA target site sequence
attgtatttgtttttgcgat

SEQ ID NO: 1132 - DNA, 20 bp, Unknown
  Description of Unknown: gRNA target site sequence
tttgtttttgcgatcagtgt

SEQ ID NO: 1133 - DNA, 20 bp, Unknown
  Description of Unknown: gRNA target site sequence
ttttgcgatcagtgttagta

SEQ ID NO: 1134 - DNA, 20 bp, Unknown
  Description of Unknown: gRNA target site sequence
tcagtgttagtaaagtgtca

SEQ ID NO: 1135 - DNA, 20 bp, Unknown
  Description of Unknown: gRNA target site sequence
cagtgttagtaaagtgtcaa

SEQ ID NO: 1136 - DNA, 20 bp, Unknown
  Description of Unknown: gRNA target site sequence
agtgttagtaaagtgtcaaa

SEQ ID NO: 1137 - DNA, 20 bp, Unknown
  Description of Unknown: gRNA target site sequence
agtaaagtgtcaaagggatt

SEQ ID NO: 1138 - DNA, 20 bp, Unknown
  Description of Unknown: gRNA target site sequence
aaagtgtcaaagggattgag

SEQ ID NO: 1139 - DNA, 20 bp, Unknown
  Description of Unknown: gRNA target site sequence
gtcaaagggattgagcagat

SEQ ID NO: 1140 - DNA, 20 bp, Unknown
  Description of Unknown: gRNA target site sequence
tgagtgacatcatgcaacac

SEQ ID NO: 1141 - DNA, 20 bp, Unknown
  Description of Unknown: gRNA target site sequence
catcatgcaacacaagtttt

SEQ ID NO: 1142 - DNA, 20 bp, Unknown
  Description of Unknown: gRNA target site sequence
aagttttgagtttcacttgt

SEQ ID NO: 1143 - DNA, 20 bp, Unknown
  Description of Unknown: gRNA target site sequence
gtttcacttgtcagactgac

SEQ ID NO: 1144 - DNA, 20 bp, Unknown
  Description of Unknown: gRNA target site sequence
ttcacttgtcagactgactg

SEQ ID NO: 1145 - DNA, 20 bp, Unknown
  Description of Unknown: gRNA target site sequence
cacttgtcagactgactgga

SEQ ID NO: 1146 - DNA, 20 bp, Unknown
  Description of Unknown: gRNA target site sequence
acttgtcagactgactggag

SEQ ID NO: 1147 - DNA, 20 bp, Unknown
  Description of Unknown: gRNA target site sequence
cttgtcagactgactggaga

SEQ ID NO: 1148 - DNA, 20 bp, Unknown
  Description of Unknown: gRNA target site sequence
ttgtcagactgactggagag

SEQ ID NO: 1149 - DNA, 20 bp, Unknown
  Description of Unknown: gRNA target site sequence
agactgactggagaggggcc

SEQ ID NO: 1150 - DNA, 20 bp, Unknown
  Description of Unknown: gRNA target site sequence
tgactggagaggggcctggt

SEQ ID NO: 1151 - DNA, 20 bp, Unknown
  Description of Unknown: gRNA target site sequence
gagaggggcctggttagtta

SEQ ID NO: 1152 - DNA, 20 bp, Unknown
  Description of Unknown: gRNA target site sequence
agaggggcctggttagttac

SEQ ID NO: 1153 - DNA, 20 bp, Unknown
  Description of Unknown: gRNA target site sequence
ggggcctggttagttacagg

SEQ ID NO: 1154 - DNA, 20 bp, Unknown
  Description of Unknown: gRNA target site sequence
gggcctggttagttacagga

SEQ ID NO: 1155 - DNA, 20 bp, Unknown
  Description of Unknown: gRNA target site sequence
ttagttacaggaaggtaatt

SEQ ID NO: 1156 - DNA, 20 bp, Unknown
  Description of Unknown: gRNA target site sequence
caggaaggtaatttggcatg

SEQ ID NO: 1157 - DNA, 20 bp, Unknown
  Description of Unknown: gRNA target site sequence
ggcatgcagccactattttt

SEQ ID NO: 1158 - DNA, 20 bp, Unknown
  Description of Unknown: gRNA target site sequence
cactatttttgagttgatgc

SEQ ID NO: 1159 - DNA, 20 bp, Unknown
  Description of Unknown: gRNA target site sequence
ttgatgcaagcctctctgta

SEQ ID NO: 1160 - DNA, 20 bp, Unknown
  Description of Unknown: gRNA target site sequence
gatgcaagcctctctgtatg

SEQ ID NO: 1161 - DNA, 20 bp, Unknown
  Description of Unknown: gRNA target site sequence
tgcaagcctctctgtatgga

SEQ ID NO: 1162 - DNA, 20 bp, Unknown
  Description of Unknown: gRNA target site sequence
agcctctctgtatggagagc

SEQ ID NO: 1163 - DNA, 20 bp, Unknown
  Description of Unknown: gRNA target site sequence
agctggtctcctttatcctg

SEQ ID NO: 1164 - DNA, 20 bp, Unknown
  Description of Unknown: gRNA target site sequence
gctggtctcctttatcctgt

SEQ ID NO: 1165 - DNA, 20 bp, Unknown
  Description of Unknown: gRNA target site sequence
tctcctttatcctgtgggaa

SEQ ID NO: 1166 - DNA, 20 bp, Unknown
  Description of Unknown: gRNA target site sequence
tcctttatcctgtgggaaaa

SEQ ID NO: 1167 - DNA, 20 bp, Unknown
  Description of Unknown: gRNA target site sequence
tcctgtgggaaaagagaaca

SEQ ID NO: 1168 - DNA, 20 bp, Unknown
  Description of Unknown: gRNA target site sequence
cctgtgggaaaagagaacaa

SEQ ID NO: 1169 - DNA, 20 bp, Unknown
  Description of Unknown: gRNA target site sequence
tgtgggaaaagagaacaaag

SEQ ID NO: 1170 - DNA, 20 bp, Unknown
  Description of Unknown: gRNA target site sequence
gaaaagagaacaaaggagca

SEQ ID NO: 1171 - DNA, 20 bp, Unknown
  Description of Unknown: gRNA target site sequence
aaaagagaacaaaggagcat

SEQ ID NO: 1172 - DNA, 20 bp, Unknown
  Description of Unknown: gRNA target site sequence
aagagaacaaaggagcatgg

SEQ ID NO: 1173 - DNA, 20 bp, Unknown
  Description of Unknown: gRNA target site sequence
aaaggagcatgggagtgttc

SEQ ID NO: 1174 - DNA, 20 bp, Unknown
  Description of Unknown: gRNA target site sequence
aaggagcatgggagtgttca

SEQ ID NO: 1175 - DNA, 20 bp, Unknown
  Description of Unknown: gRNA target site sequence
aggagcatgggagtgttcaa

SEQ ID NO: 1176 - DNA, 20 bp, Unknown
  Description of Unknown: gRNA target site sequence
agcatgggagtgttcaaggg

SEQ ID NO: 1177 - DNA, 20 bp, Unknown
  Description of Unknown: gRNA target site sequence
gcatgggagtgttcaaggga

SEQ ID NO: 1178 - DNA, 20 bp, Unknown
  Description of Unknown: gRNA target site sequence
atgggagtgttcaagggaag

SEQ ID NO: 1179 - DNA, 20 bp, Unknown
  Description of Unknown: gRNA target site sequence
gttcaagggaaggagaaata

SEQ ID NO: 1180 - DNA, 20 bp, Unknown
  Description of Unknown: gRNA target site sequence
ttcaagggaaggagaaataa

SEQ ID NO: 1181 - DNA, 20 bp, Unknown
  Description of Unknown: gRNA target site sequence
tcaagggaaggagaaataaa

SEQ ID NO: 1182 - DNA, 20 bp, Unknown
  Description of Unknown: gRNA target site sequence
agggaaggagaaataaaggg

SEQ ID NO: 1183 - DNA, 20 bp, Unknown
  Description of Unknown: gRNA target site sequence
ggaaggagaaataaagggca

SEQ ID NO: 1184 - DNA, 20 bp, Unknown
  Description of Unknown: gRNA target site sequence
aaggagaaataaagggcaga

SEQ ID NO: 1185 - DNA, 20 bp, Unknown
  Description of Unknown: gRNA target site sequence
aggagaaataaagggcagag

SEQ ID NO: 1186 - DNA, 20 bp, Unknown
  Description of Unknown: gRNA target site sequence
agaaataaagggcagagagg

SEQ ID NO: 1187 - DNA, 20 bp, Unknown
  Description of Unknown: gRNA target site sequence
aataaagggcagagaggcag

SEQ ID NO: 1188 - DNA, 20 bp, Unknown
  Description of Unknown: gRNA target site sequence
aaagggcagagaggcagcgg

SEQ ID NO: 1189 - DNA, 20 bp, Unknown
  Description of Unknown: gRNA target site sequence
cagagaggcagcggtggtgt

SEQ ID NO: 1190 - DNA, 20 bp, Unknown
  Description of Unknown: gRNA target site sequence
agagaggcagcggtggtgtc

SEQ ID NO: 1191 - DNA, 20 bp, Unknown
  Description of Unknown: gRNA target site sequence
gagaggcagcggtggtgtca

SEQ ID NO: 1192 - DNA, 20 bp, Unknown
  Description of Unknown: gRNA target site sequence
agaggcagcggtggtgtcag

SEQ ID NO: 1193 - DNA, 20 bp, Unknown
  Description of Unknown: gRNA target site sequence
ggcagcggtggtgtcagggg

SEQ ID NO: 1194 - DNA, 20 bp, Unknown
  Description of Unknown: gRNA target site sequence
gtggtgtcaggggaagccca

SEQ ID NO: 1195 - DNA, 20 bp, Unknown
  Description of Unknown: gRNA target site sequence
tggtgtcaggggaagcccac

SEQ ID NO: 1196 - DNA, 20 bp, Unknown
  Description of Unknown: gRNA target site sequence
gtgtcaggggaagcccacag

SEQ ID NO: 1197 - DNA, 20 bp, Unknown
  Description of Unknown: gRNA target site sequence
gggaagcccacaggagttaa

SEQ ID NO: 1198 - DNA, 20 bp, Unknown
  Description of Unknown: gRNA target site sequence
aagcccacaggagttaacag

SEQ ID NO: 1199 - DNA, 20 bp, Unknown
  Description of Unknown: gRNA target site sequence
agcccacaggagttaacagc

SEQ ID NO: 1200 - DNA, 20 bp, Unknown
  Description of Unknown: gRNA target site sequence
gcccacaggagttaacagca

SEQ ID NO: 1201 - DNA, 20 bp, Unknown
  Description of Unknown: gRNA target site sequence
acagcagggttgcctcaacc

SEQ ID NO: 1202 - DNA, 20 bp, Unknown
  Description of Unknown: gRNA target site sequence
agcagggttgcctcaaccta

SEQ ID NO: 1203 - DNA, 20 bp, Unknown
  Description of Unknown: gRNA target site sequence
cagggttgcctcaacctaga

SEQ ID NO: 1204 - DNA, 20 bp, Unknown
  Description of Unknown: gRNA target site sequence
agggttgcctcaacctagag

SEQ ID NO: 1205 - DNA, 20 bp, Unknown
  Description of Unknown: gRNA target site sequence
gttgcctcaacctagagagg

SEQ ID NO: 1206 - DNA, 20 bp, Unknown
  Description of Unknown: gRNA target site sequence
aacctagagaggaagcgacc

SEQ ID NO: 1207 - DNA, 20 bp, Unknown
  Description of Unknown: gRNA target site sequence
aggaagcgacctggtgccct

SEQ ID NO: 1208 - DNA, 20 bp, Unknown
  Description of Unknown: gRNA target site sequence
acctggtgccctcggctctg

SEQ ID NO: 1209 - DNA, 20 bp, Unknown
  Description of Unknown: gRNA target site sequence
cttccactctacaacaatgc

SEQ ID NO: 1210 - DNA, 20 bp, Unknown
  Description of Unknown: gRNA target site sequence
ttccactctacaacaatgcc

SEQ ID NO: 1211 - DNA, 20 bp, Unknown
  Description of Unknown: gRNA target site sequence
tccactctacaacaatgcca

SEQ ID NO: 1212 - DNA, 20 bp, Unknown
  Description of Unknown: gRNA target site sequence
actctacaacaatgccaggg

SEQ ID NO: 1213 - DNA, 20 bp, Unknown
  Description of Unknown: gRNA target site sequence
ctctacaacaatgccaggga

SEQ ID NO: 1214 - DNA, 20 bp, Unknown
  Description of Unknown: gRNA target site sequence
tacaacaatgccagggaagg

SEQ ID NO: 1215 - DNA, 20 bp, Unknown
  Description of Unknown: gRNA target site sequence
caacaatgccagggaaggcg

SEQ ID NO: 1216 - DNA, 20 bp, Unknown
  Description of Unknown: gRNA target site sequence
aacaatgccagggaaggcgg

SEQ ID NO: 1217 - DNA, 20 bp, Unknown
  Description of Unknown: gRNA target site sequence
atgccagggaaggcggaggc

SEQ ID NO: 1218 - DNA, 20 bp, Unknown
  Description of Unknown: gRNA target site sequence
agggaaggcggaggctggta

SEQ ID NO: 1219 - DNA, 20 bp, Unknown
  Description of Unknown: gRNA target site sequence
ggaggctggtacagtgcatc

SEQ ID NO: 1220 - DNA, 20 bp, Unknown
  Description of Unknown: gRNA target site sequence
tggtacagtgcatcaagaca

SEQ ID NO: 1221 - DNA, 20 bp, Unknown
  Description of Unknown: gRNA target site sequence
catcaagacacagctactcc

SEQ ID NO: 1222 - DNA, 20 bp, Unknown
  Description of Unknown: gRNA target site sequence
atcaagacacagctactcct

SEQ ID NO: 1223 - DNA, 20 bp, Unknown
  Description of Unknown: gRNA target site sequence
acacagctactcctgggtga

SEQ ID NO: 1224 - DNA, 20 bp, Unknown
  Description of Unknown: gRNA target site sequence
acagctactcctgggtgaca

SEQ ID NO: 1225 - DNA, 20 bp, Unknown
  Description of Unknown: gRNA target site sequence
cagctactcctgggtgacag

SEQ ID NO: 1226 - DNA, 20 bp, Unknown
  Description of Unknown: gRNA target site sequence
actcctgggtgacagaggtt

SEQ ID NO: 1227 - DNA, 20 bp, Unknown
  Description of Unknown: gRNA target site sequence
ctcctgggtgacagaggttc

SEQ ID NO: 1228 - DNA, 20 bp, Unknown
  Description of Unknown: gRNA target site sequence
tcctgggtgacagaggttca

SEQ ID NO: 1229 - DNA, 20 bp, Unknown
  Description of Unknown: gRNA target site sequence
gggtgacagaggttcagggc

SEQ ID NO: 1230 - DNA, 20 bp, Unknown
  Description of Unknown: gRNA target site sequence
aggttcagggccagctcact

SEQ ID NO: 1231 - DNA, 20 bp, Unknown
  Description of Unknown: gRNA target site sequence
ttcagggccagctcactaag

SEQ ID NO: 1232 - DNA, 20 bp, Unknown
  Description of Unknown: gRNA target site sequence
tcagggccagctcactaagt

SEQ ID NO: 1233 - DNA, 20 bp, Unknown
  Description of Unknown: gRNA target site sequence
gggccagctcactaagtagg

SEQ ID NO: 1234 - DNA, 20 bp, Unknown
  Description of Unknown: gRNA target site sequence
ccagctcactaagtaggcag

SEQ ID NO: 1235 - DNA, 20 bp, Unknown
  Description of Unknown: gRNA target site sequence
aagtttttgacatatacttt

SEQ ID NO: 1236 - DNA, 20 bp, Unknown
  Description of Unknown: gRNA target site sequence
gtttttgacatatactttga

SEQ ID NO: 1237 - DNA, 20 bp, Unknown
  Description of Unknown: gRNA target site sequence
gacatatactttgagagata

SEQ ID NO: 1238 - DNA, 20 bp, Unknown
  Description of Unknown: gRNA target site sequence
tatactttgagagataaagc

SEQ ID NO: 1239 - DNA, 20 bp, Unknown
  Description of Unknown: gRNA target site sequence
agattctgtacctcaacctt

SEQ ID NO: 1240 - DNA, 20 bp, Unknown
  Description of Unknown: gRNA target site sequence
atttcccctaccactcatta

SEQ ID NO: 1241 - DNA, 20 bp, Unknown
  Description of Unknown: gRNA target site sequence
cctaccactcattatagttc

SEQ ID NO: 1242 - DNA, 20 bp, Unknown
  Description of Unknown: gRNA target site sequence
taccactcattatagttccg

SEQ ID NO: 1243 - DNA, 20 bp, Unknown
  Description of Unknown: gRNA target site sequence
attatagttccggagctata

SEQ ID NO: 1244 - DNA, 20 bp, Unknown
  Description of Unknown: gRNA target site sequence
ctatcattctatcataacct

SEQ ID NO: 1245 - DNA, 20 bp, Unknown
  Description of Unknown: gRNA target site sequence
ctatcataaccttagaatac

SEQ ID NO: 1246 - DNA, 20 bp, Unknown
  Description of Unknown: gRNA target site sequence
atcataaccttagaatacca

SEQ ID NO: 1247 - DNA, 20 bp, Unknown
  Description of Unknown: gRNA target site sequence
tactatatgtgaaaaaaatg

SEQ ID NO: 1248 - DNA, 20 bp, Unknown
  Description of Unknown: gRNA target site sequence
actatatgtgaaaaaaatga

SEQ ID NO: 1249 - DNA, 20 bp, Unknown
  Description of Unknown: gRNA target site sequence
tgtgaaaaaaatgaaggaca

SEQ ID NO: 1250 - DNA, 20 bp, Unknown
  Description of Unknown: gRNA target site sequence
gtgaaaaaaatgaaggacat

SEQ ID NO: 1251 - DNA, 20 bp, Unknown
  Description of Unknown: gRNA target site sequence
tgaaaaaaatgaaggacatg

SEQ ID NO: 1252 - DNA, 20 bp, Unknown
  Description of Unknown: gRNA target site sequence
gaaaaaaatgaaggacatgg

SEQ ID NO: 1253 - DNA, 20 bp, Unknown
  Description of Unknown: gRNA target site sequence
aaaaatgaaggacatggggg

SEQ ID NO: 1254 - DNA, 20 bp, Unknown
  Description of Unknown: gRNA target site sequence
gccccaaatcacatatttca

SEQ ID NO: 1255 - DNA, 20 bp, Unknown
  Description of Unknown: gRNA target site sequence
ccaaatcacatatttcatgg

SEQ ID NO: 1256 - DNA, 20 bp, Unknown
  Description of Unknown: gRNA target site sequence
aaatcacatatttcatggta

SEQ ID NO: 1257 - DNA, 20 bp, Unknown
  Description of Unknown: gRNA target site sequence
cacatatttcatggtagagc

SEQ ID NO: 1258 - DNA, 20 bp, Unknown
  Description of Unknown: gRNA target site sequence
acatatttcatggtagagcc

SEQ ID NO: 1259 - DNA, 20 bp, Unknown
  Description of Unknown: gRNA target site sequence
aggtcttctgtttgtcatat

SEQ ID NO: 1260 - DNA, 20 bp, Unknown
  Description of Unknown: gRNA target site sequence
ttcctgccacaaccatcttg

SEQ ID NO: 1261 - DNA, 20 bp, Unknown
  Description of Unknown: gRNA target site sequence
atcttgaagaatctatttct

SEQ ID NO: 1262 - DNA, 20 bp, Unknown
  Description of Unknown: gRNA target site sequence
tgaagaatctatttctcagt

SEQ ID NO: 1263 - DNA, 20 bp, Unknown
  Description of Unknown: gRNA target site sequence
tcagtaagaaaatatcttta

SEQ ID NO: 1264 - DNA, 20 bp, Unknown
  Description of Unknown: gRNA target site sequence
agtaagaaaatatctttatg

SEQ ID NO: 1265 - DNA, 20 bp, Unknown
  Description of Unknown: gRNA target site sequence
taagaaaatatctttatgga

SEQ ID NO: 1266 - DNA, 20 bp, Unknown
  Description of Unknown: gRNA target site sequence
gaaaatatctttatggagag

SEQ ID NO: 1267 - DNA, 20 bp, Unknown
  Description of Unknown: gRNA target site sequence
atatctttatggagagtagc

SEQ ID NO: 1268 - DNA, 20 bp, Unknown
  Description of Unknown: gRNA target site sequence
tatggagagtagctggaaaa

SEQ ID NO: 1269 - DNA, 20 bp, Unknown
  Description of Unknown: gRNA target site sequence
agagtagctggaaaacagtt

SEQ ID NO: 1270 - DNA, 20 bp, Unknown
  Description of Unknown: gRNA target site sequence
agtagctggaaaacagttga

SEQ ID NO: 1271 - DNA, 20 bp, Unknown
  Description of Unknown: gRNA target site sequence
gctggaaaacagttgagaga

SEQ ID NO: 1272 - DNA, 20 bp, Unknown
  Description of Unknown: gRNA target site sequence
tggaaaacagttgagagatg

SEQ ID NO: 1273 - DNA, 20 bp, Unknown
  Description of Unknown: gRNA target site sequence
ggaaaacagttgagagatgg

SEQ ID NO: 1274 - DNA, 20 bp, Unknown
  Description of Unknown: gRNA target site sequence
gaaaacagttgagagatgga

SEQ ID NO: 1275 - DNA, 20 bp, Unknown
  Description of Unknown: gRNA target site sequence
aaaacagttgagagatggag

SEQ ID NO: 1276 - DNA, 20 bp, Unknown
  Description of Unknown: gRNA target site sequence
aacagttgagagatggaggg

SEQ ID NO: 1277 - DNA, 20 bp, Unknown
  Description of Unknown: gRNA target site sequence
acagttgagagatggagggg

SEQ ID NO: 1278 - DNA, 20 bp, Unknown
  Description of Unknown: gRNA target site sequence
ttgagagatggaggggaggc

SEQ ID NO: 1279 - DNA, 20 bp, Unknown
  Description of Unknown: gRNA target site sequence
tgagagatggaggggaggct

SEQ ID NO: 1280 - DNA, 20 bp, Unknown
  Description of Unknown: gRNA target site sequence
gagagatggaggggaggctg

SEQ ID NO: 1281 - DNA, 20 bp, Unknown
  Description of Unknown: gRNA target site sequence
agagatggaggggaggctgg

SEQ ID NO: 1282 - DNA, 20 bp, Unknown
  Description of Unknown: gRNA target site sequence
tggaggggaggctgggggtg

SEQ ID NO: 1283 - DNA, 20 bp, Unknown
  Description of Unknown: gRNA target site sequence
gaggggaggctgggggtgtg

SEQ ID NO: 1284 - DNA, 20 bp, Unknown
  Description of Unknown: gRNA target site sequence
ggggaggctgggggtgtgga

SEQ ID NO: 1285 - DNA, 20 bp, Unknown
  Description of Unknown: gRNA target site sequence
gggaggctgggggtgtggag

SEQ ID NO: 1286 - DNA, 20 bp, Unknown
  Description of Unknown: gRNA target site sequence
ggaggctgggggtgtggaga

SEQ ID NO: 1287 - DNA, 20 bp, Unknown
  Description of Unknown: gRNA target site sequence
gaggctgggggtgtggagag

SEQ ID NO: 1288 - DNA, 20 bp, Unknown
  Description of Unknown: gRNA target site sequence
gctgggggtgtggagagggg

SEQ ID NO: 1289 - DNA, 20 bp, Unknown
  Description of Unknown: gRNA target site sequence
ctgggggtgtggagagggga

SEQ ID NO: 1290 - DNA, 20 bp, Unknown
  Description of Unknown: gRNA target site sequence
tgggggtgtggagaggggaa

SEQ ID NO: 1291 - DNA, 20 bp, Unknown
  Description of Unknown: gRNA target site sequence
gggggtgtggagaggggaag

SEQ ID NO: 1292 - DNA, 20 bp, Unknown
  Description of Unknown: gRNA target site sequence
gtgtggagaggggaaggggt

SEQ ID NO: 1293 - DNA, 20 bp, Unknown
  Description of Unknown: gRNA target site sequence
agaggggaaggggtaagtga

SEQ ID NO: 1294 - DNA, 20 bp, Unknown
  Description of Unknown: gRNA target site sequence
ggtaagtgatagattcgttg

SEQ ID NO: 1295 - DNA, 20 bp, Unknown
  Description of Unknown: gRNA target site sequence
gtaagtgatagattcgttga

SEQ ID NO: 1296 - DNA, 20 bp, Unknown
  Description of Unknown: gRNA target site sequence
taagtgatagattcgttgaa

SEQ ID NO: 1297 - DNA, 20 bp, Unknown
  Description of Unknown: gRNA target site sequence
aagtgatagattcgttgaag

SEQ ID NO: 1298 - DNA, 20 bp, Unknown
  Description of Unknown: gRNA target site sequence
agtgatagattcgttgaagg

SEQ ID NO: 1299 - DNA, 20 bp, Unknown
  Description of Unknown: gRNA target site sequence
gtgatagattcgttgaaggg

SEQ ID NO: 1300 - DNA, 20 bp, Unknown
  Description of Unknown: gRNA target site sequence
gatagattcgttgaaggggg

SEQ ID NO: 1301 - DNA, 20 bp, Unknown
  Description of Unknown: gRNA target site sequence
attcgttgaaggggggagaa

SEQ ID NO: 1302 - DNA, 20 bp, Unknown
  Description of Unknown: gRNA target site sequence
ttcgttgaaggggggagaaa

SEQ ID NO: 1303 - DNA, 20 bp, Unknown
  Description of Unknown: gRNA target site sequence
gaaggggggagaaaaggccg

SEQ ID NO: 1304 - DNA, 20 bp, Unknown
  Description of Unknown: gRNA target site sequence
aaggggggagaaaaggccgt

SEQ ID NO: 1305 - DNA, 20 bp, Unknown
  Description of Unknown: gRNA target site sequence
aggggggagaaaaggccgtg

SEQ ID NO: 1306 - DNA, 20 bp, Unknown
  Description of Unknown: gRNA target site sequence
gagaaaaggccgtggggatg

SEQ ID NO: 1307 - DNA, 20 bp, Unknown
  Description of Unknown: gRNA target site sequence
aaaggccgtggggatgaagc

SEQ ID NO: 1308 - DNA, 20 bp, Unknown
  Description of Unknown: gRNA target site sequence
ggccgtggggatgaagctag

SEQ ID NO: 1309 - DNA, 20 bp, Unknown
  Description of Unknown: gRNA target site sequence
gccgtggggatgaagctaga

SEQ ID NO: 1310 - DNA, 20 bp, Unknown
  Description of Unknown: gRNA target site sequence
gtggggatgaagctagaagg

SEQ ID NO: 1311 - DNA, 20 bp, Unknown
  Description of Unknown: gRNA target site sequence
gggatgaagctagaaggcag

SEQ ID NO: 1312 - DNA, 20 bp, Unknown
  Description of Unknown: gRNA target site sequence
ggatgaagctagaaggcaga

SEQ ID NO: 1313 - DNA, 20 bp, Unknown
  Description of Unknown: gRNA target site sequence
gatgaagctagaaggcagaa

SEQ ID NO: 1314 - DNA, 20 bp, Unknown
  Description of Unknown: gRNA target site sequence
agaaggcagaagggcttgcc

SEQ ID NO: 1315 - DNA, 20 bp, Unknown
  Description of Unknown: gRNA target site sequence
gaaggcagaagggcttgcct

SEQ ID NO: 1316 - DNA, 20 bp, Unknown
  Description of Unknown: gRNA target site sequence
cagaagggcttgcctgggct

SEQ ID NO: 1317 - DNA, 20 bp, Unknown
  Description of Unknown: gRNA target site sequence
cttgcctgggcttggccatg

SEQ ID NO: 1318 - DNA, 20 bp, Unknown
  Description of Unknown: gRNA target site sequence
ttgcctgggcttggccatga

SEQ ID NO: 1319 - DNA, 20 bp, Unknown
  Description of Unknown: gRNA target site sequence
gcctgggcttggccatgaag

SEQ ID NO: 1320 - DNA, 20 bp, Unknown
  Description of Unknown: gRNA target site sequence
gcttggccatgaaggagcat

SEQ ID NO: 1321 - DNA, 20 bp, Unknown
  Description of Unknown: gRNA target site sequence
tgaaggagcatgagttcact

SEQ ID NO: 1322 - DNA, 20 bp, Unknown
  Description of Unknown: gRNA target site sequence
tgagttcactgagttccctt

SEQ ID NO: 1323 - DNA, 20 bp, Unknown
  Description of Unknown: gRNA target site sequence
tccctttggcttttccatgc

SEQ ID NO: 1324 - DNA, 20 bp, Unknown
  Description of Unknown: gRNA target site sequence
ttccatgctagcaatgcacg

SEQ ID NO: 1325 - DNA, 20 bp, Unknown
  Description of Unknown: gRNA target site sequence
tgctagcaatgcacgtggcc

SEQ ID NO: 1326 - DNA, 20 bp, Unknown
  Description of Unknown: gRNA target site sequence
gcacgtggcccagcctgctg

SEQ ID NO: 1327 - DNA, 20 bp, Unknown
  Description of Unknown: gRNA target site sequence
ggcccagcctgctgtggtac

SEQ ID NO: 1328 - DNA, 20 bp, Unknown
  Description of Unknown: gRNA target site sequence
cagcctgctgtggtactggc

SEQ ID NO: 1329 - DNA, 20 bp, Unknown
  Description of Unknown: gRNA target site sequence
cctgctgtggtactggccag

SEQ ID NO: 1330 - DNA, 20 bp, Unknown
  Description of Unknown: gRNA target site sequence
tgtggtactggccagcagcc

SEQ ID NO: 1331 - DNA, 20 bp, Unknown
  Description of Unknown: gRNA target site sequence
gtggtactggccagcagccg

SEQ ID NO: 1332 - DNA, 20 bp, Unknown
  Description of Unknown: gRNA target site sequence
gccagcagccgaggcatcgc

SEQ ID NO: 1333 - DNA, 20 bp, Unknown
  Description of Unknown: gRNA target site sequence
gcatcgccagctttgtgtgt

SEQ ID NO: 1334 - DNA, 20 bp, Unknown
  Description of Unknown: gRNA target site sequence
tgtgtgtgagtatgcatctc

SEQ ID NO: 1335 - DNA, 20 bp, Unknown
  Description of Unknown: gRNA target site sequence
gtgtgtgagtatgcatctcc

SEQ ID NO: 1336 - DNA, 20 bp, Unknown
  Description of Unknown: gRNA target site sequence
tgagtatgcatctccaggca

SEQ ID NO: 1337 - DNA, 20 bp, Unknown
  Description of Unknown: gRNA target site sequence
catctccaggcaaagccact

SEQ ID NO: 1338 - DNA, 20 bp, Unknown
  Description of Unknown: gRNA target site sequence
atctccaggcaaagccactg

SEQ ID NO: 1339 - DNA, 20 bp, Unknown
  Description of Unknown: gRNA target site sequence
caggcaaagccactgaggtc

SEQ ID NO: 1340 - DNA, 20 bp, Unknown
  Description of Unknown: gRNA target site sequence
aggcaaagccactgaggtcc

SEQ ID NO: 1341 - DNA, 20 bp, Unknown
  Description of Unknown: gRNA target site sequence
agccactgaggtccgggtga

SEQ ID NO: 1342 - DNA, 20 bp, Unknown
  Description of Unknown: gRNA target site sequence
aggtccgggtgacagtgctt

SEQ ID NO: 1343 - DNA, 20 bp, Unknown
  Description of Unknown: gRNA target site sequence
tccgggtgacagtgcttcgg

SEQ ID NO: 1344 - DNA, 20 bp, Unknown
  Description of Unknown: gRNA target site sequence
ccgggtgacagtgcttcggc

SEQ ID NO: 1345 - DNA, 20 bp, Unknown
  Description of Unknown: gRNA target site sequence
acagtgcttcggcaggctga

SEQ ID NO: 1346 - DNA, 20 bp, Unknown
  Description of Unknown: gRNA target site sequence
tgcttcggcaggctgacagc

SEQ ID NO: 1347 - DNA, 20 bp, Unknown
  Description of Unknown: gRNA target site sequence
gcttcggcaggctgacagcc

SEQ ID NO: 1348 - DNA, 20 bp, Unknown
  Description of Unknown: gRNA target site sequence
ggctgacagccaggtgactg

SEQ ID NO: 1349 - DNA, 20 bp, Unknown
  Description of Unknown: gRNA target site sequence
ccaggtgactgaagtctgtg

SEQ ID NO: 1350 - DNA, 20 bp, Unknown
  Description of Unknown: gRNA target site sequence
ctgtgcggcaacctacatga

SEQ ID NO: 1351 - DNA, 20 bp, Unknown
  Description of Unknown: gRNA target site sequence
tgtgcggcaacctacatgat

SEQ ID NO: 1352 - DNA, 20 bp, Unknown
  Description of Unknown: gRNA target site sequence
gtgcggcaacctacatgatg

SEQ ID NO: 1353 - DNA, 20 bp, Unknown
  Description of Unknown: gRNA target site sequence
caacctacatgatggggaat

SEQ ID NO: 1354 - DNA, 20 bp, Unknown
  Description of Unknown: gRNA target site sequence
ggggaatgagttgaccttcc

SEQ ID NO: 1355 - DNA, 20 bp, Unknown
  Description of Unknown: gRNA target site sequence
cctagatgattccatctgca

SEQ ID NO: 1356 - DNA, 20 bp, Unknown
  Description of Unknown: gRNA target site sequence
ctagatgattccatctgcac

SEQ ID NO: 1357 - DNA, 20 bp, Unknown
  Description of Unknown: gRNA target site sequence
tccatctgcacgggcacctc

SEQ ID NO: 1358 - DNA, 20 bp, Unknown
  Description of Unknown: gRNA target site sequence
atctgcacgggcacctccag

SEQ ID NO: 1359 - DNA, 20 bp, Unknown
  Description of Unknown: gRNA target site sequence
gggcacctccagtggaaatc

SEQ ID NO: 1360 - DNA, 20 bp, Unknown
  Description of Unknown: gRNA target site sequence
tcaagtgaacctcactatcc

SEQ ID NO: 1361 - DNA, 20 bp, Unknown
  Description of Unknown: gRNA target site sequence
caagtgaacctcactatcca

SEQ ID NO: 1362 - DNA, 20 bp, Unknown
  Description of Unknown: gRNA target site sequence
aacctcactatccaaggact

SEQ ID NO: 1363 - DNA, 20 bp, Unknown
  Description of Unknown: gRNA target site sequence
acctcactatccaaggactg

SEQ ID NO: 1364 - DNA, 20 bp, Unknown
  Description of Unknown: gRNA target site sequence
cctcactatccaaggactga

SEQ ID NO: 1365 - DNA, 20 bp, Unknown
  Description of Unknown: gRNA target site sequence
tatccaaggactgagggcca

SEQ ID NO: 1366 - DNA, 20 bp, Unknown
  Description of Unknown: gRNA target site sequence
aggactgagggccatggaca

SEQ ID NO: 1367 - DNA, 20 bp, Unknown
  Description of Unknown: gRNA target site sequence
ggactgagggccatggacac

SEQ ID NO: 1368 - DNA, 20 bp, Unknown
  Description of Unknown: gRNA target site sequence
acacgggactctacatctgc

SEQ ID NO: 1369 - DNA, 20 bp, Unknown
  Description of Unknown: gRNA target site sequence
cacgggactctacatctgca

SEQ ID NO: 1370 - DNA, 20 bp, Unknown
  Description of Unknown: gRNA target site sequence
gggactctacatctgcaagg

SEQ ID NO: 1371 - DNA, 20 bp, Unknown
  Description of Unknown: gRNA target site sequence
gactctacatctgcaaggtg

SEQ ID NO: 1372 - DNA, 20 bp, Unknown
  Description of Unknown: gRNA target site sequence
gtacccaccgccatactacc

SEQ ID NO: 1373 - DNA, 20 bp, Unknown
  Description of Unknown: gRNA target site sequence
tacccaccgccatactacct

SEQ ID NO: 1374 - DNA, 20 bp, Unknown
  Description of Unknown: gRNA target site sequence
accgccatactacctgggca

SEQ ID NO: 1375 - DNA, 20 bp, Unknown
  Description of Unknown: gRNA target site sequence
ccgccatactacctgggcat

SEQ ID NO: 1376 - DNA, 20 bp, Unknown
  Description of Unknown: gRNA target site sequence
tactacctgggcataggcaa

SEQ ID NO: 1377 - DNA, 20 bp, Unknown
  Description of Unknown: gRNA target site sequence
tgggcataggcaacggaacc

SEQ ID NO: 1378 - DNA, 20 bp, Unknown
  Description of Unknown: gRNA target site sequence
ggaacccagatttatgtaat

SEQ ID NO: 1379 - DNA, 20 bp, Unknown
  Description of Unknown: gRNA target site sequence
cccagatttatgtaattggt

SEQ ID NO: 1380 - DNA, 20 bp, Unknown
  Description of Unknown: gRNA target site sequence
atttatgtaattggtgagca

SEQ ID NO: 1381 - DNA, 20 bp, Unknown
  Description of Unknown: gRNA target site sequence
gtgagcaaagccatttcact

SEQ ID NO: 1382 - DNA, 20 bp, Unknown
  Description of Unknown: gRNA target site sequence
agttgacacctgttgcattg

SEQ ID NO: 1383 - DNA, 20 bp, Unknown
  Description of Unknown: gRNA target site sequence
cagtcttctatgcacaaaaa

SEQ ID NO: 1384 - DNA, 20 bp, Unknown
  Description of Unknown: gRNA target site sequence
acagttttgttccttaattt

SEQ ID NO: 1385 - DNA, 20 bp, Unknown
  Description of Unknown: gRNA target site sequence
cagttttgttccttaatttc

SEQ ID NO: 1386 - DNA, 20 bp, Unknown
  Description of Unknown: gRNA target site sequence
gttttgttccttaatttcag

SEQ ID NO: 1387 - DNA, 20 bp, Unknown
  Description of Unknown: gRNA target site sequence
ttttgttccttaatttcagg

SEQ ID NO: 1388 - DNA, 20 bp, Unknown
  Description of Unknown: gRNA target site sequence
aatttcaggaggtttacttt

SEQ ID NO: 1389 - DNA, 20 bp, Unknown
  Description of Unknown: gRNA target site sequence
atttcaggaggtttactttt

SEQ ID NO: 1390 - DNA, 20 bp, Unknown
  Description of Unknown: gRNA target site sequence
gaggtttacttttaggactg

SEQ ID NO: 1391 - DNA, 20 bp, Unknown
  Description of Unknown: gRNA target site sequence
ggactgtggacattctcttt

SEQ ID NO: 1392 - DNA, 20 bp, Unknown
  Description of Unknown: gRNA target site sequence
actgtggacattctctttaa

SEQ ID NO: 1393 - DNA, 20 bp, Unknown
  Description of Unknown: gRNA target site sequence
tttaagagttctgtaccaca

SEQ ID NO: 1394 - DNA, 20 bp, Unknown
  Description of Unknown: gRNA target site sequence
aagagttctgtaccacatgg

SEQ ID NO: 1395 - DNA, 20 bp, Unknown
  Description of Unknown: gRNA target site sequence
catggtagccttgcttattg

SEQ ID NO: 1396 - DNA, 20 bp, Unknown
  Description of Unknown: gRNA target site sequence
atggtagccttgcttattgt

SEQ ID NO: 1397 - DNA, 20 bp, Unknown
  Description of Unknown: gRNA target site sequence
gtagccttgcttattgtggg

SEQ ID NO: 1398 - DNA, 20 bp, Unknown
  Description of Unknown: gRNA target site sequence
attgtgggtggcaaccttaa

SEQ ID NO: 1399 - DNA, 20 bp, Unknown
  Description of Unknown: gRNA target site sequence
gactgtaaaataaaatgatt

SEQ ID NO: 1400 - DNA, 20 bp, Unknown
  Description of Unknown: gRNA target site sequence
actgtaaaataaaatgattt

SEQ ID NO: 1401 - DNA, 20 bp, Unknown
  Description of Unknown: gRNA target site sequence
ctgtaaaataaaatgatttg

SEQ ID NO: 1402 - DNA, 20 bp, Unknown
  Description of Unknown: gRNA target site sequence
taaaataaaatgatttgggg

SEQ ID NO: 1403 - DNA, 20 bp, Unknown
  Description of Unknown: gRNA target site sequence
ataaaatgatttggggaagt

SEQ ID NO: 1404 - DNA, 20 bp, Unknown
  Description of Unknown: gRNA target site sequence
taaaatgatttggggaagtt

SEQ ID NO: 1405 - DNA, 20 bp, Unknown
  Description of Unknown: gRNA target site sequence
aaaatgatttggggaagttg

SEQ ID NO: 1406 - DNA, 20 bp, Unknown
  Description of Unknown: gRNA target site sequence
ggaagttggggctctcgctc

SEQ ID NO: 1407 - DNA, 20 bp, Unknown
  Description of Unknown: gRNA target site sequence
aagttggggctctcgctctg

SEQ ID NO: 1408 - DNA, 20 bp, Unknown
  Description of Unknown: gRNA target site sequence
ttgatatgatatgatgctcc

SEQ ID NO: 1409 - DNA, 20 bp, Unknown
  Description of Unknown: gRNA target site sequence
tgatatgatatgatgctcct

SEQ ID NO: 1410 - DNA, 20 bp, Unknown
  Description of Unknown: gRNA target site sequence
gatatgatatgatgctcctg

SEQ ID NO: 1411 - DNA, 20 bp, Unknown
  Description of Unknown: gRNA target site sequence
atgatatgatgctcctgggg

SEQ ID NO: 1412 - DNA, 20 bp, Unknown
  Description of Unknown: gRNA target site sequence
atatgatgctcctggggaag

SEQ ID NO: 1413 - DNA, 20 bp, Unknown
  Description of Unknown: gRNA target site sequence
cctggggaagtagtcccaaa

SEQ ID NO: 1414 - DNA, 20 bp, Unknown
  Description of Unknown: gRNA target site sequence
tcccaaatagccaaacctat

SEQ ID NO: 1415 - DNA, 20 bp, Unknown
  Description of Unknown: gRNA target site sequence
caaatagccaaacctattgg

SEQ ID NO: 1416 - DNA, 20 bp, Unknown
  Description of Unknown: gRNA target site sequence
aaatagccaaacctattggt

SEQ ID NO: 1417 - DNA, 20 bp, Unknown
  Description of Unknown: gRNA target site sequence
ggtgggctacccatgcaatt

SEQ ID NO: 1418 - DNA, 20 bp, Unknown
  Description of Unknown: gRNA target site sequence
gtgggctacccatgcaattt

SEQ ID NO: 1419 - DNA, 20 bp, Unknown
  Description of Unknown: gRNA target site sequence
tgggctacccatgcaattta

SEQ ID NO: 1420 - DNA, 20 bp, Unknown
  Description of Unknown: gRNA target site sequence
gggctacccatgcaatttag

SEQ ID NO: 1421 - DNA, 20 bp, Unknown
  Description of Unknown: gRNA target site sequence
ctacccatgcaatttagggg

SEQ ID NO: 1422 - DNA, 20 bp, Unknown
  Description of Unknown: gRNA target site sequence
gcaatttaggggtggacctc

SEQ ID NO: 1423 - DNA, 20 bp, Unknown
  Description of Unknown: gRNA target site sequence
caatttaggggtggacctca

SEQ ID NO: 1424 - DNA, 20 bp, Unknown
  Description of Unknown: gRNA target site sequence
taggggtggacctcaaggcc

SEQ ID NO: 1425 - DNA, 20 bp, Unknown
  Description of Unknown: gRNA target site sequence
gggtggacctcaaggcctgg

SEQ ID NO: 1426 - DNA, 20 bp, Unknown
  Description of Unknown: gRNA target site sequence
tgtccttttttcaccaatgt

SEQ ID NO: 1427 - DNA, 20 bp, Unknown
  Description of Unknown: gRNA target site sequence
gtccttttttcaccaatgtt

SEQ ID NO: 1428 - DNA, 20 bp, Unknown
  Description of Unknown: gRNA target site sequence
tccttttttcaccaatgttg

SEQ ID NO: 1429 - DNA, 20 bp, Unknown
  Description of Unknown: gRNA target site sequence
cttttttcaccaatgttggg

SEQ ID NO: 1430 - DNA, 20 bp, Unknown
  Description of Unknown: gRNA target site sequence
ttttcaccaatgttggggag

SEQ ID NO: 1431 - DNA, 20 bp, Unknown
  Description of Unknown: gRNA target site sequence
ttcaccaatgttggggagta

SEQ ID NO: 1432 - DNA, 20 bp, Unknown
  Description of Unknown: gRNA target site sequence
aatgttggggagtagagccc

SEQ ID NO: 1433 - DNA, 20 bp, Unknown
  Description of Unknown: gRNA target site sequence
tgttggggagtagagcccta

SEQ ID NO: 1434 - DNA, 20 bp, Unknown
  Description of Unknown: gRNA target site sequence
cctagagtttaaaactgtct

SEQ ID NO: 1435 - DNA, 20 bp, Unknown
  Description of Unknown: gRNA target site sequence
ctagagtttaaaactgtctc

SEQ ID NO: 1436 - DNA, 20 bp, Unknown
  Description of Unknown: gRNA target site sequence
tagagtttaaaactgtctca

SEQ ID NO: 1437 - DNA, 20 bp, Unknown
  Description of Unknown: gRNA target site sequence
gagtttaaaactgtctcagg

SEQ ID NO: 1438 - DNA, 20 bp, Unknown
  Description of Unknown: gRNA target site sequence
agtttaaaactgtctcaggg

SEQ ID NO: 1439 - DNA, 20 bp, Unknown
  Description of Unknown: gRNA target site sequence
ctctgctttgttttctgttg

SEQ ID NO: 1440 - DNA, 20 bp, Unknown
  Description of Unknown: gRNA target site sequence
tttgttttctgttgcagatc

SEQ ID NO: 1441 - DNA, 20 bp, Unknown
  Description of Unknown: gRNA target site sequence
tgcagatccagaaccgtgcc

SEQ ID NO: 1442 - DNA, 20 bp, Unknown
  Description of Unknown: gRNA target site sequence
cagattctgacttcctcctc

SEQ ID NO: 1443 - DNA, 20 bp, Unknown
  Description of Unknown: gRNA target site sequence
cttcctcctctggatccttg

SEQ ID NO: 1444 - DNA, 20 bp, Unknown
  Description of Unknown: gRNA target site sequence
cctcctctggatccttgcag

SEQ ID NO: 1445 - DNA, 20 bp, Unknown
  Description of Unknown: gRNA target site sequence
ctctggatccttgcagcagt

SEQ ID NO: 1446 - DNA, 20 bp, Unknown
  Description of Unknown: gRNA target site sequence
gatccttgcagcagttagtt

SEQ ID NO: 1447 - DNA, 20 bp, Unknown
  Description of Unknown: gRNA target site sequence
atccttgcagcagttagttc

SEQ ID NO: 1448 - DNA, 20 bp, Unknown
  Description of Unknown: gRNA target site sequence
tccttgcagcagttagttcg

SEQ ID NO: 1449 - DNA, 20 bp, Unknown
  Description of Unknown: gRNA target site sequence
agttcggggttgttttttta

SEQ ID NO: 1450 - DNA, 20 bp, Unknown
  Description of Unknown: gRNA target site sequence
tttttatagctttctcctca

SEQ ID NO: 1451 - DNA, 20 bp, Unknown
  Description of Unknown: gRNA target site sequence
ctcctcacagctgtttcttt

SEQ ID NO: 1452 - DNA, 20 bp, Unknown
  Description of Unknown: gRNA target site sequence
agctgtttctttgagcaaaa

SEQ ID NO: 1453 - DNA, 20 bp, Unknown
  Description of Unknown: gRNA target site sequence
gtttctttgagcaaaatggt

SEQ ID NO: 1454 - DNA, 20 bp, Unknown
  Description of Unknown: gRNA target site sequence
tttgagcaaaatggtgagtg

SEQ ID NO: 1455 - DNA, 20 bp, Unknown
  Description of Unknown: gRNA target site sequence
aatggtgagtgtggtgctga

SEQ ID NO: 1456 - DNA, 20 bp, Unknown
  Description of Unknown: gRNA target site sequence
tgatggtgcaccatgtctga

SEQ ID NO: 1457 - DNA, 20 bp, Unknown
  Description of Unknown: gRNA target site sequence
gatggtgcaccatgtctgat

SEQ ID NO: 1458 - DNA, 20 bp, Unknown
  Description of Unknown: gRNA target site sequence
atggtgcaccatgtctgatg

SEQ ID NO: 1459 - DNA, 20 bp, Unknown
  Description of Unknown: gRNA target site sequence
atgtctgatggggatacctt

SEQ ID NO: 1460 - DNA, 20 bp, Unknown
  Description of Unknown: gRNA target site sequence
tctgatggggatacctttag

SEQ ID NO: 1461 - DNA, 20 bp, Unknown
  Description of Unknown: gRNA target site sequence
atacctttagtggtatcaac

SEQ ID NO: 1462 - DNA, 20 bp, Unknown
  Description of Unknown: gRNA target site sequence
tagtggtatcaactggccaa

SEQ ID NO: 1463 - DNA, 20 bp, Unknown
  Description of Unknown: gRNA target site sequence
actggccaaaagatgatgtt

SEQ ID NO: 1464 - DNA, 20 bp, Unknown
  Description of Unknown: gRNA target site sequence
ccaaaagatgatgttgagtt

SEQ ID NO: 1465 - DNA, 20 bp, Unknown
  Description of Unknown: gRNA target site sequence
atgttgagtttagtgttctt

SEQ ID NO: 1466 - DNA, 20 bp, Unknown
  Description of Unknown: gRNA target site sequence
gagtttagtgttcttgagat

SEQ ID NO: 1467 - DNA, 20 bp, Unknown
  Description of Unknown: gRNA target site sequence
tagtgttcttgagatgagat

SEQ ID NO: 1468 - DNA, 20 bp, Unknown
  Description of Unknown: gRNA target site sequence
agtgttcttgagatgagatg

SEQ ID NO: 1469 - DNA, 20 bp, Unknown
  Description of Unknown: gRNA target site sequence
atgagatgaggcaataaatg

SEQ ID NO: 1470 - DNA, 20 bp, Unknown
  Description of Unknown: gRNA target site sequence
gagatgaggcaataaatgaa

SEQ ID NO: 1471 - DNA, 20 bp, Unknown
  Description of Unknown: gRNA target site sequence
agatgaggcaataaatgaag

SEQ ID NO: 1472 - DNA, 20 bp, Unknown
  Description of Unknown: gRNA target site sequence
tgaggcaataaatgaagagg

SEQ ID NO: 1473 - DNA, 20 bp, Unknown
  Description of Unknown: gRNA target site sequence
gaggcaataaatgaagagga

SEQ ID NO: 1474 - DNA, 20 bp, Unknown
  Description of Unknown: gRNA target site sequence
caataaatgaagaggaagga

SEQ ID NO: 1475 - DNA, 20 bp, Unknown
  Description of Unknown: gRNA target site sequence
taaatgaagaggaaggacag

SEQ ID NO: 1476 - DNA, 20 bp, Unknown
  Description of Unknown: gRNA target site sequence
gaagaggaaggacagtggta

SEQ ID NO: 1477 - DNA, 20 bp, Unknown
  Description of Unknown: gRNA target site sequence
gacagtggtaaagaacgcac

SEQ ID NO: 1478 - DNA, 20 bp, Unknown
  Description of Unknown: gRNA target site sequence
taaagaacgcactagaaccg

SEQ ID NO: 1479 - DNA, 20 bp, Unknown
  Description of Unknown: gRNA target site sequence
aaagaacgcactagaaccgt

SEQ ID NO: 1480 - DNA, 20 bp, Unknown
  Description of Unknown: gRNA target site sequence
cgcactagaaccgtaggcat

SEQ ID NO: 1481 - DNA, 20 bp, Unknown
  Description of Unknown: gRNA target site sequence
aaccgtaggcattggcattt

SEQ ID NO: 1482 - DNA, 20 bp, Unknown
  Description of Unknown: gRNA target site sequence
accgtaggcattggcatttg

SEQ ID NO: 1483 - DNA, 20 bp, Unknown
  Description of Unknown: gRNA target site sequence
ggcattggcatttgaggttt

SEQ ID NO: 1484 - DNA, 20 bp, Unknown
  Description of Unknown: gRNA target site sequence
tttcagaatgactaatattt

SEQ ID NO: 1485 - DNA, 20 bp, Unknown
  Description of Unknown: gRNA target site sequence
ttgaatgttcatgtgcttct

SEQ ID NO: 1486 - DNA, 20 bp, Unknown
  Description of Unknown: gRNA target site sequence
aatgttcatgtgcttctgag

SEQ ID NO: 1487 - DNA, 20 bp, Unknown
  Description of Unknown: gRNA target site sequence
atgttcatgtgcttctgagc

SEQ ID NO: 1488 - DNA, 20 bp, Unknown
  Description of Unknown: gRNA target site sequence
tgttcatgtgcttctgagca

SEQ ID NO: 1489 - DNA, 20 bp, Unknown
  Description of Unknown: gRNA target site sequence
tctgagcagggtttcaattt

SEQ ID NO: 1490 - DNA, 20 bp, Unknown
  Description of Unknown: gRNA target site sequence
gagtaaccgttgcaataaca

SEQ ID NO: 1491 - DNA, 20 bp, Unknown
  Description of Unknown: gRNA target site sequence
agtaaccgttgcaataacat

SEQ ID NO: 1492 - DNA, 20 bp, Unknown
  Description of Unknown: gRNA target site sequence
gtaaccgttgcaataacatg

SEQ ID NO: 1493 - DNA, 20 bp, Unknown
  Description of Unknown: gRNA target site sequence
accgttgcaataacatgggg

SEQ ID NO: 1494 - DNA, 20 bp, Unknown
  Description of Unknown: gRNA target site sequence
tcttcatgacaactgtactt

SEQ ID NO: 1495 - DNA, 20 bp, Unknown
  Description of Unknown: gRNA target site sequence
gacaactgtacttaagctaa

SEQ ID NO: 1496 - DNA, 20 bp, Unknown
  Description of Unknown: gRNA target site sequence
agctaacagccctgaaacat

SEQ ID NO: 1497 - DNA, 20 bp, Unknown
  Description of Unknown: gRNA target site sequence
acagccctgaaacatgagat

SEQ ID NO: 1498 - DNA, 20 bp, Unknown
  Description of Unknown: gRNA target site sequence
cagccctgaaacatgagatt

SEQ ID NO: 1499 - DNA, 20 bp, Unknown
  Description of Unknown: gRNA target site sequence
cctgaaacatgagattaggc

SEQ ID NO: 1500 - DNA, 20 bp, Unknown
  Description of Unknown: gRNA target site sequence
ctgaaacatgagattaggct

SEQ ID NO: 1501 - DNA, 20 bp, Unknown
  Description of Unknown: gRNA target site sequence
aaacatgagattaggctggg

SEQ ID NO: 1502 - DNA, 20 bp, Unknown
  Description of Unknown: gRNA target site sequence
taggctgggcagaatgctgc

SEQ ID NO: 1503 - DNA, 20 bp, Unknown
  Description of Unknown: gRNA target site sequence
ggctgggcagaatgctgcta

SEQ ID NO: 1504 - DNA, 20 bp, Unknown
  Description of Unknown: gRNA target site sequence
ctgggcagaatgctgctaga

SEQ ID NO: 1505 - DNA, 20 bp, Unknown
  Description of Unknown: gRNA target site sequence
tgggcagaatgctgctagag

SEQ ID NO: 1506 - DNA, 20 bp, Unknown
  Description of Unknown: gRNA target site sequence
tgctgctagagaggaccact

SEQ ID NO: 1507 - DNA, 20 bp, Unknown
  Description of Unknown: gRNA target site sequence
gctagagaggaccacttgga

SEQ ID NO: 1508 - DNA, 20 bp, Unknown
  Description of Unknown: gRNA target site sequence
ccatgtccctctccatcacc

SEQ ID NO: 1509 - DNA, 20 bp, Unknown
  Description of Unknown: gRNA target site sequence
tgtccctctccatcacctgg

SEQ ID NO: 1510 - DNA, 20 bp, Unknown
  Description of Unknown: gRNA target site sequence
catcacctggaagtcacctc

SEQ ID NO: 1511 - DNA, 20 bp, Unknown
  Description of Unknown: gRNA target site sequence
atcacctggaagtcacctct

SEQ ID NO: 1512 - DNA, 20 bp, Unknown
  Description of Unknown: gRNA target site sequence
gtcacctctgggtgccactc

SEQ ID NO: 1513 - DNA, 20 bp, Unknown
  Description of Unknown: gRNA target site sequence
ctctggtgccttccttgtcg

SEQ ID NO: 1514 - DNA, 20 bp, Unknown
  Description of Unknown: gRNA target site sequence
tgccttccttgtcgaagctg

SEQ ID NO: 1515 - DNA, 20 bp, Unknown
  Description of Unknown: gRNA target site sequence
tgacacctatccctgttatc

SEQ ID NO: 1516 - DNA, 20 bp, Unknown
  Description of Unknown: gRNA target site sequence
tgttatccagtttgcttgac

SEQ ID NO: 1517 - DNA, 20 bp, Unknown
  Description of Unknown: gRNA target site sequence
gttatccagtttgcttgact

SEQ ID NO: 1518 - DNA, 20 bp, Unknown
  Description of Unknown: gRNA target site sequence
ggacgttttgccttcccctt

SEQ ID NO: 1519 - DNA, 20 bp, Unknown
  Description of Unknown: gRNA target site sequence
gttttgccttccccttcagc

SEQ ID NO: 1520 - DNA, 20 bp, Unknown
  Description of Unknown: gRNA target site sequence
ttttgccttccccttcagcc

SEQ ID NO: 1521 - DNA, 20 bp, Unknown
  Description of Unknown: gRNA target site sequence
tgccttccccttcagccagg

SEQ ID NO: 1522 - DNA, 20 bp, Unknown
  Description of Unknown: gRNA target site sequence
ccccttcagccaggaagtga

SEQ ID NO: 1523 - DNA, 20 bp, Unknown
  Description of Unknown: gRNA target site sequence
cagccaggaagtgaaagtcc

SEQ ID NO: 1524 - DNA, 20 bp, Unknown
  Description of Unknown: gRNA target site sequence
gtcccagtttttatttatca

SEQ ID NO: 1525 - DNA, 20 bp, Unknown
  Description of Unknown: gRNA target site sequence
tcccagtttttatttatcac

SEQ ID NO: 1526 - DNA, 20 bp, Unknown
  Description of Unknown: gRNA target site sequence
tttttatttatcacaggtgt

SEQ ID NO: 1527 - DNA, 20 bp, Unknown
  Description of Unknown: gRNA target site sequence
tttatcacaggtgttggtat

SEQ ID NO: 1528 - DNA, 20 bp, Unknown
  Description of Unknown: gRNA target site sequence
atcacaggtgttggtattgg

SEQ ID NO: 1529 - DNA, 20 bp, Unknown
  Description of Unknown: gRNA target site sequence
acaggtgttggtattggtgg

SEQ ID NO: 1530 - DNA, 20 bp, Unknown
  Description of Unknown: gRNA target site sequence
ggtgttggtattggtggtag

SEQ ID NO: 1531 - DNA, 20 bp, Unknown
  Description of Unknown: gRNA target site sequence
tgttggtattggtggtagaa

SEQ ID NO: 1532 - DNA, 20 bp, Unknown
  Description of Unknown: gRNA target site sequence
gttggtattggtggtagaag

SEQ ID NO: 1533 - DNA, 20 bp, Unknown
  Description of Unknown: gRNA target site sequence
ggtattggtggtagaagagg

SEQ ID NO: 1534 - DNA, 20 bp, Unknown
  Description of Unknown: gRNA target site sequence
tggtagaagaggtagaatta

SEQ ID NO: 1535 - DNA, 20 bp, Unknown
  Description of Unknown: gRNA target site sequence
aagaggtagaattatggaat

SEQ ID NO: 1536 - DNA, 20 bp, Unknown
  Description of Unknown: gRNA target site sequence
agaggtagaattatggaatc

SEQ ID NO: 1537 - DNA, 20 bp, Unknown
  Description of Unknown: gRNA target site sequence
tatggaatcaggcctcctgt

SEQ ID NO: 1538 - DNA, 20 bp, Unknown
  Description of Unknown: gRNA target site sequence
atggaatcaggcctcctgtc

SEQ ID NO: 1539 - DNA, 20 bp, Unknown
  Description of Unknown: gRNA target site sequence
ctgtcaggatttctttttga

SEQ ID NO: 1540 - DNA, 20 bp, Unknown
  Description of Unknown: gRNA target site sequence
ttctttttgacagtccctct

SEQ ID NO: 1541 - DNA, 20 bp, Unknown
  Description of Unknown: gRNA target site sequence
cctctcagacacctctgcct

SEQ ID NO: 1542 - DNA, 20 bp, Unknown
  Description of Unknown: gRNA target site sequence
ctctcagacacctctgccta

SEQ ID NO: 1543 - DNA, 20 bp, Unknown
  Description of Unknown: gRNA target site sequence
cagacacctctgcctaaggc

SEQ ID NO: 1544 - DNA, 20 bp, Unknown
  Description of Unknown: gRNA target site sequence
gtctcttatacacatacaca

SEQ ID NO: 1545 - DNA, 20 bp, Unknown
  Description of Unknown: gRNA target site sequence
acatcctctacccaacctga

SEQ ID NO: 1546 - DNA, 20 bp, Unknown
  Description of Unknown: gRNA target site sequence
atcctctacccaacctgaca

SEQ ID NO: 1547 - DNA, 20 bp, Unknown
  Description of Unknown: gRNA target site sequence
gacagagatgtcctttgctg

SEQ ID NO: 1548 - DNA, 20 bp, Unknown
  Description of Unknown: gRNA target site sequence
acagagatgtcctttgctgt

SEQ ID NO: 1549 - DNA, 20 bp, Unknown
  Description of Unknown: gRNA target site sequence
gatgtcctttgctgtaggtt

SEQ ID NO: 1550 - DNA, 20 bp, Unknown
  Description of Unknown: gRNA target site sequence
gtcctttgctgtaggttcag

SEQ ID NO: 1551 - DNA, 20 bp, Unknown
  Description of Unknown: gRNA target site sequence
ctttgctgtaggttcagcag

SEQ ID NO: 1552 - DNA, 20 bp, Unknown
  Description of Unknown: gRNA target site sequence
tttgctgtaggttcagcagt

SEQ ID NO: 1553 - DNA, 20 bp, Unknown
  Description of Unknown: gRNA target site sequence
ttgctgtaggttcagcagtg

SEQ ID NO: 1554 - DNA, 20 bp, Unknown
  Description of Unknown: gRNA target site sequence
gtaggttcagcagtggggat

SEQ ID NO: 1555 - DNA, 20 bp, Unknown
  Description of Unknown: gRNA target site sequence
agcagtggggatgagaaata

SEQ ID NO: 1556 - DNA, 20 bp, Unknown
  Description of Unknown: gRNA target site sequence
tgagaaatacagctctcaaa

SEQ ID NO: 1557 - DNA, 20 bp, Unknown
  Description of Unknown: gRNA target site sequence
gagaaatacagctctcaaac

SEQ ID NO: 1558 - DNA, 20 bp, Unknown
  Description of Unknown: gRNA target site sequence
gctctcaaacaggataacta

SEQ ID NO: 1559 - DNA, 20 bp, Unknown
  Description of Unknown: gRNA target site sequence
ctaaagcttattatcttatc

SEQ ID NO: 1560 - DNA, 20 bp, Unknown
  Description of Unknown: gRNA target site sequence
ttatcaagcttgttcccttg

SEQ ID NO: 1561 - DNA, 20 bp, Unknown
  Description of Unknown: gRNA target site sequence
aagcttgttcccttgcagac

SEQ ID NO: 1562 - DNA, 20 bp, Unknown
  Description of Unknown: gRNA target site sequence
acaagattgatcaattatca

SEQ ID NO: 1563 - DNA, 20 bp, Unknown
  Description of Unknown: gRNA target site sequence
caagattgatcaattatcat

SEQ ID NO: 1564 - DNA, 20 bp, Unknown
  Description of Unknown: gRNA target site sequence
atcaattatcataggctttc

SEQ ID NO: 1565 - DNA, 20 bp, Unknown
  Description of Unknown: gRNA target site sequence
tcaattatcataggctttct

SEQ ID NO: 1566 - DNA, 20 bp, Unknown
  Description of Unknown: gRNA target site sequence
ctttctgggtgttctttctg

SEQ ID NO: 1567 - DNA, 20 bp, Unknown
  Description of Unknown: gRNA target site sequence
ttctttctgaagctttctca

SEQ ID NO: 1568 - DNA, 20 bp, Unknown
  Description of Unknown: gRNA target site sequence
ctttctcctatcttccattc

SEQ ID NO: 1569 - DNA, 20 bp, Unknown
  Description of Unknown: gRNA target site sequence
tttctcctatcttccattca

SEQ ID NO: 1570 - DNA, 20 bp, Unknown
  Description of Unknown: gRNA target site sequence
gccatttaacatcaaaatca

SEQ ID NO: 1571 - DNA, 20 bp, Unknown
  Description of Unknown: gRNA target site sequence
ttatctaaaataaattttaa

SEQ ID NO: 1572 - DNA, 20 bp, Unknown
  Description of Unknown: gRNA target site sequence
taaattttaatagctgaatc

SEQ ID NO: 1573 - DNA, 20 bp, Unknown
  Description of Unknown: gRNA target site sequence
ctgaatcaagaaaatctcct

SEQ ID NO: 1574 - DNA, 20 bp, Unknown
  Description of Unknown: gRNA target site sequence
tgaatcaagaaaatctcctg

SEQ ID NO: 1575 - DNA, 20 bp, Unknown
  Description of Unknown: gRNA target site sequence
tgtgaacattcatttttaac

SEQ ID NO: 1576 - DNA, 20 bp, Unknown
  Description of Unknown: gRNA target site sequence
aacattcatttttaaccagc

SEQ ID NO: 1577 - DNA, 20 bp, Unknown
  Description of Unknown: gRNA target site sequence
acattcatttttaaccagct

SEQ ID NO: 1578 - DNA, 20 bp, Unknown
  Description of Unknown: gRNA target site sequence
cattcatttttaaccagcta

SEQ ID NO: 1579 - DNA, 20 bp, Unknown
  Description of Unknown: gRNA target site sequence
ctagggacccaatatgtgtt

SEQ ID NO: 1580 - DNA, 20 bp, Unknown
  Description of Unknown: gRNA target site sequence
atatgtgttgagttctatta

SEQ ID NO: 1581 - DNA, 20 bp, Unknown
  Description of Unknown: gRNA target site sequence
gtgttgagttctattatggt

SEQ ID NO: 1582 - DNA, 20 bp, Unknown
  Description of Unknown: gRNA target site sequence
ttgagttctattatggttag

SEQ ID NO: 1583 - DNA, 20 bp, Unknown
  Description of Unknown: gRNA target site sequence
agttctattatggttagaag

SEQ ID NO: 1584 - DNA, 20 bp, Unknown
  Description of Unknown: gRNA target site sequence
gaagtggcttccgtattcct

SEQ ID NO: 1585 - DNA, 20 bp, Unknown
  Description of Unknown: gRNA target site sequence
gtggcttccgtattcctcag

SEQ ID NO: 1586 - DNA, 20 bp, Unknown
  Description of Unknown: gRNA target site sequence
ctgtttctttttgtgtttga

SEQ ID NO: 1587 - DNA, 20 bp, Unknown
  Description of Unknown: gRNA target site sequence
ctttttgtgtttgacagcta

SEQ ID NO: 1588 - DNA, 20 bp, Unknown
  Description of Unknown: gRNA target site sequence
tgtgtttgacagctaaagaa

SEQ ID NO: 1589 - DNA, 20 bp, Unknown
  Description of Unknown: gRNA target site sequence
gtttgacagctaaagaaaag

SEQ ID NO: 1590 - DNA, 20 bp, Unknown
  Description of Unknown: gRNA target site sequence
gaaaagaagccctcttacaa

SEQ ID NO: 1591 - DNA, 20 bp, Unknown
  Description of Unknown: gRNA target site sequence
aaaagaagccctcttacaac

SEQ ID NO: 1592 - DNA, 20 bp, Unknown
  Description of Unknown: gRNA target site sequence
aaagaagccctcttacaaca

SEQ ID NO: 1593 - DNA, 20 bp, Unknown
  Description of Unknown: gRNA target site sequence
aagaagccctcttacaacag

SEQ ID NO: 1594 - DNA, 20 bp, Unknown
  Description of Unknown: gRNA target site sequence
ctatgtgaaaatgcccccaa

SEQ ID NO: 1595 - DNA, 20 bp, Unknown
  Description of Unknown: gRNA target site sequence
atgtgaaaatgcccccaaca

SEQ ID NO: 1596 - DNA, 20 bp, Unknown
  Description of Unknown: gRNA target site sequence
gaaaatgcccccaacagagc

SEQ ID NO: 1597 - DNA, 20 bp, Unknown
  Description of Unknown: gRNA target site sequence
caacagagccagaatgtgaa

SEQ ID NO: 1598 - DNA, 20 bp, Unknown
  Description of Unknown: gRNA target site sequence
cagaatgtgaaaagcaattt

SEQ ID NO: 1599 - DNA, 20 bp, Unknown
  Description of Unknown: gRNA target site sequence
ttattttattcccatcaatt

SEQ ID NO: 1600 - DNA, 20 bp, Unknown
  Description of Unknown: gRNA target site sequence
tcaattgagaaaccattatg

SEQ ID NO: 1601 - DNA, 20 bp, Unknown
  Description of Unknown: gRNA target site sequence
attgagaaaccattatgaag

SEQ ID NO: 1602 - DNA, 20 bp, Unknown
  Description of Unknown: gRNA target site sequence
tgagaaaccattatgaagaa

SEQ ID NO: 1603 - DNA, 20 bp, Unknown
  Description of Unknown: gRNA target site sequence
agaaaccattatgaagaaga

SEQ ID NO: 1604 - DNA, 20 bp, Unknown
  Description of Unknown: gRNA target site sequence
gagtccatatttcaatttcc

SEQ ID NO: 1605 - DNA, 20 bp, Unknown
  Description of Unknown: gRNA target site sequence
gtccatatttcaatttccaa

SEQ ID NO: 1606 - DNA, 20 bp, Unknown
  Description of Unknown: gRNA target site sequence
tatttcaatttccaagagct

SEQ ID NO: 1607 - DNA, 20 bp, Unknown
  Description of Unknown: gRNA target site sequence
atttcaatttccaagagctg

SEQ ID NO: 1608 - DNA, 20 bp, Unknown
  Description of Unknown: gRNA target site sequence
attctaacttttttgctatc

SEQ ID NO: 1609 - DNA, 20 bp, Unknown
  Description of Unknown: gRNA target site sequence
tttttatttgtttgtgcatt

SEQ ID NO: 1610 - DNA, 20 bp, Unknown
  Description of Unknown: gRNA target site sequence
ttttatttgtttgtgcattt

SEQ ID NO: 1611 - DNA, 20 bp, Unknown
  Description of Unknown: gRNA target site sequence
tttatttgtttgtgcatttg

SEQ ID NO: 1612 - DNA, 20 bp, Unknown
  Description of Unknown: gRNA target site sequence
ttatttgtttgtgcatttgg

SEQ ID NO: 1613 - DNA, 20 bp, Unknown
  Description of Unknown: gRNA target site sequence
tatttgtttgtgcatttggg

SEQ ID NO: 1614 - DNA, 20 bp, Unknown
  Description of Unknown: gRNA target site sequence
attcatctctctttaatata

SEQ ID NO: 1615 - DNA, 20 bp, Unknown
  Description of Unknown: gRNA target site sequence
atctctctttaatataaagt

SEQ ID NO: 1616 - DNA, 20 bp, Unknown
  Description of Unknown: gRNA target site sequence
ctttaatataaagttggatg

SEQ ID NO: 1617 - DNA, 20 bp, Unknown
  Description of Unknown: gRNA target site sequence
attacgtgtactacaattta

SEQ ID NO: 1618 - DNA, 20 bp, Unknown
  Description of Unknown: gRNA target site sequence
gtgtactacaatttaaagca

SEQ ID NO: 1619 - DNA, 20 bp, Unknown
  Description of Unknown: gRNA target site sequence
tgtactacaatttaaagcaa

SEQ ID NO: 1620 - DNA, 20 bp, Unknown
  Description of Unknown: gRNA target site sequence
tactacaatttaaagcaaag

SEQ ID NO: 1621 - DNA, 20 bp, Unknown
  Description of Unknown: gRNA target site sequence
tacaatttaaagcaaaggag

SEQ ID NO: 1622 - DNA, 20 bp, Unknown
  Description of Unknown: gRNA target site sequence
atttaaagcaaaggagtaga

SEQ ID NO: 1623 - DNA, 20 bp, Unknown
  Description of Unknown: gRNA target site sequence
aaagcaaaggagtagaaaga

SEQ ID NO: 1624 - DNA, 20 bp, Unknown
  Description of Unknown: gRNA target site sequence
agcaaaggagtagaaagaca

SEQ ID NO: 1625 - DNA, 20 bp, Unknown
  Description of Unknown: gRNA target site sequence
aaggagtagaaagacagagc

SEQ ID NO: 1626 - DNA, 20 bp, Unknown
  Description of Unknown: gRNA target site sequence
aggagtagaaagacagagct

SEQ ID NO: 1627 - DNA, 20 bp, Unknown
  Description of Unknown: gRNA target site sequence
ctgggatgtttctgtcacat

SEQ ID NO: 1628 - DNA, 20 bp, Unknown
  Description of Unknown: gRNA target site sequence
tgtcacatcagctccacttt

SEQ ID NO: 1629 - DNA, 20 bp, Unknown
  Description of Unknown: gRNA target site sequence
atcagctccactttcagtga

SEQ ID NO: 1630 - DNA, 20 bp, Unknown
  Description of Unknown: gRNA target site sequence
ctttcagtgaaagcatcact

SEQ ID NO: 1631 - DNA, 20 bp, Unknown
  Description of Unknown: gRNA target site sequence
tttcagtgaaagcatcactt

SEQ ID NO: 1632 - DNA, 20 bp, Unknown
  Description of Unknown: gRNA target site sequence
agcatcacttgggattaata

SEQ ID NO: 1633 - DNA, 20 bp, Unknown
  Description of Unknown: gRNA target site sequence
gcatcacttgggattaatat

SEQ ID NO: 1634 - DNA, 20 bp, Unknown
  Description of Unknown: gRNA target site sequence
catcacttgggattaatatg

SEQ ID NO: 1635 - DNA, 20 bp, Unknown
  Description of Unknown: gRNA target site sequence
ttgggattaatatggggatg

SEQ ID NO: 1636 - DNA, 20 bp, Unknown
  Description of Unknown: gRNA target site sequence
ggggatgcagcattatgatg

SEQ ID NO: 1637 - DNA, 20 bp, Unknown
  Description of Unknown: gRNA target site sequence
gggatgcagcattatgatgt

SEQ ID NO: 1638 - DNA, 20 bp, Unknown
  Description of Unknown: gRNA target site sequence
gcagcattatgatgtgggtc

SEQ ID NO: 1639 - DNA, 20 bp, Unknown
  Description of Unknown: gRNA target site sequence
cagcattatgatgtgggtca

SEQ ID NO: 1640 - DNA, 20 bp, Unknown
  Description of Unknown: gRNA target site sequence
atgatgtgggtcaaggaatt

SEQ ID NO: 1641 - DNA, 20 bp, Unknown
  Description of Unknown: gRNA target site sequence
tgtgggtcaaggaattaagt

SEQ ID NO: 1642 - DNA, 20 bp, Unknown
  Description of Unknown: gRNA target site sequence
gtgggtcaaggaattaagtt

SEQ ID NO: 1643 - DNA, 20 bp, Unknown
  Description of Unknown: gRNA target site sequence
tgggtcaaggaattaagtta

SEQ ID NO: 1644 - DNA, 20 bp, Unknown
  Description of Unknown: gRNA target site sequence
caaggaattaagttagggaa

SEQ ID NO: 1645 - DNA, 20 bp, Unknown
  Description of Unknown: gRNA target site sequence
aattaagttagggaatggca

SEQ ID NO: 1646 - DNA, 20 bp, Unknown
  Description of Unknown: gRNA target site sequence
ttagggaatggcacagccca

SEQ ID NO: 1647 - DNA, 20 bp, Unknown
  Description of Unknown: gRNA target site sequence
gggaatggcacagcccaaag

SEQ ID NO: 1648 - DNA, 20 bp, Unknown
  Description of Unknown: gRNA target site sequence
ggaatggcacagcccaaaga

SEQ ID NO: 1649 - DNA, 20 bp, Unknown
  Description of Unknown: gRNA target site sequence
ggcacagcccaaagaaggaa

SEQ ID NO: 1650 - DNA, 20 bp, Unknown
  Description of Unknown: gRNA target site sequence
gcacagcccaaagaaggaaa

SEQ ID NO: 1651 - DNA, 20 bp, Unknown
  Description of Unknown: gRNA target site sequence
cagcccaaagaaggaaaagg

SEQ ID NO: 1652 - DNA, 20 bp, Unknown
  Description of Unknown: gRNA target site sequence
agcccaaagaaggaaaaggc

SEQ ID NO: 1653 - DNA, 20 bp, Unknown
  Description of Unknown: gRNA target site sequence
gcccaaagaaggaaaaggca

SEQ ID NO: 1654 - DNA, 20 bp, Unknown
  Description of Unknown: gRNA target site sequence
ccaaagaaggaaaaggcagg

SEQ ID NO: 1655 - DNA, 20 bp, Unknown
  Description of Unknown: gRNA target site sequence
agaaggaaaaggcagggagc

SEQ ID NO: 1656 - DNA, 20 bp, Unknown
  Description of Unknown: gRNA target site sequence
gaaggaaaaggcagggagcg

SEQ ID NO: 1657 - DNA, 20 bp, Unknown
  Description of Unknown: gRNA target site sequence
aaggaaaaggcagggagcga

SEQ ID NO: 1658 - DNA, 20 bp, Unknown
  Description of Unknown: gRNA target site sequence
ggaaaaggcagggagcgagg

SEQ ID NO: 1659 - DNA, 20 bp, Unknown
  Description of Unknown: gRNA target site sequence
aaaggcagggagcgagggag

SEQ ID NO: 1660 - DNA, 20 bp, Unknown
  Description of Unknown: gRNA target site sequence
cacaccttatatttacgtat

SEQ ID NO: 1661 - DNA, 20 bp, Unknown
  Description of Unknown: gRNA target site sequence
atttacgtatgagacgttta

SEQ ID NO: 1662 - DNA, 20 bp, Unknown
  Description of Unknown: gRNA target site sequence
atagccgaaatgatcttttc

SEQ ID NO: 1663 - DNA, 20 bp, Unknown
  Description of Unknown: gRNA target site sequence
aacaaatgtatgattacatc

SEQ ID NO: 1664 - DNA, 20 bp, Unknown
  Description of Unknown: gRNA target site sequence
acaaatgtatgattacatca

SEQ ID NO: 1665 - DNA, 20 bp, Unknown
  Description of Unknown: gRNA target site sequence
aggcttcaaaaatactcaca

SEQ ID NO: 1666 - DNA, 20 bp, Unknown
  Description of Unknown: gRNA target site sequence
atactcacatggctatgttt

SEQ ID NO: 1667 - DNA, 20 bp, Unknown
  Description of Unknown: gRNA target site sequence
tcacatggctatgttttagc

SEQ ID NO: 1668 - DNA, 20 bp, Unknown
  Description of Unknown: gRNA target site sequence
tgttttagccagtgatgcta

SEQ ID NO: 1669 - DNA, 20 bp, Unknown
  Description of Unknown: gRNA target site sequence
gttttagccagtgatgctaa

SEQ ID NO: 1670 - DNA, 20 bp, Unknown
  Description of Unknown: gRNA target site sequence
atatatatattttaatttga

SEQ ID NO: 1671 - DNA, 20 bp, Unknown
  Description of Unknown: gRNA target site sequence
taatttgatagtattgtgca

SEQ ID NO: 1672 - DNA, 20 bp, Unknown
  Description of Unknown: gRNA target site sequence
atttgatagtattgtgcata

SEQ ID NO: 1673 - DNA, 20 bp, Unknown
  Description of Unknown: gRNA target site sequence
tgtttttgtgtatttgttaa

SEQ ID NO: 1674 - DNA, 20 bp, Unknown
  Description of Unknown: gRNA target site sequence
gtttgaatataaacactata

SEQ ID NO: 1675 - DNA, 20 bp, Unknown
  Description of Unknown: gRNA target site sequence
tgaatataaacactatatgg

SEQ ID NO: 1676 - DNA, 20 bp, Unknown
  Description of Unknown: gRNA target site sequence
atggcagtgtctttccacct

SEQ ID NO: 1677 - DNA, 20 bp, Unknown
  Description of Unknown: gRNA target site sequence
tggcagtgtctttccacctt

SEQ ID NO: 1678 - DNA, 20 bp, Unknown
  Description of Unknown: gRNA target site sequence
tgtctttccaccttgggtcc

SEQ ID NO: 1679 - DNA, 20 bp, Unknown
  Description of Unknown: gRNA target site sequence
gtctttccaccttgggtccc

SEQ ID NO: 1680 - DNA, 20 bp, Unknown
  Description of Unknown: gRNA target site sequence
tctttccaccttgggtccca

SEQ ID NO: 1681 - DNA, 20 bp, Unknown
  Description of Unknown: gRNA target site sequence
ttccaccttgggtcccaggg

SEQ ID NO: 1682 - DNA, 20 bp, Unknown
  Description of Unknown: gRNA target site sequence
tgggtcccagggaagttttg

SEQ ID NO: 1683 - DNA, 20 bp, Unknown
  Description of Unknown: gRNA target site sequence
ggtcccagggaagttttgtg

SEQ ID NO: 1684 - DNA, 20 bp, Unknown
  Description of Unknown: gRNA target site sequence
gtcccagggaagttttgtgg

SEQ ID NO: 1685 - DNA, 20 bp, Unknown
  Description of Unknown: gRNA target site sequence
cccagggaagttttgtggag

SEQ ID NO: 1686 - DNA, 20 bp, Unknown
  Description of Unknown: gRNA target site sequence
ggaagttttgtggaggagct

SEQ ID NO: 1687 - DNA, 20 bp, Unknown
  Description of Unknown: gRNA target site sequence
gaagttttgtggaggagctc

SEQ ID NO: 1688 - DNA, 20 bp, Unknown
  Description of Unknown: gRNA target site sequence
agctcaggacactaatacac

SEQ ID NO: 1689 - DNA, 20 bp, Unknown
  Description of Unknown: gRNA target site sequence
gctcaggacactaatacacc

SEQ ID NO: 1690 - DNA, 20 bp, Unknown
  Description of Unknown: gRNA target site sequence
caggacactaatacaccagg

SEQ ID NO: 1691 - DNA, 20 bp, Unknown
  Description of Unknown: gRNA target site sequence
taatacaccaggtagaacac

SEQ ID NO: 1692 - DNA, 20 bp, Unknown
  Description of Unknown: gRNA target site sequence
aatacaccaggtagaacaca

SEQ ID NO: 1693 - DNA, 20 bp, Unknown
  Description of Unknown: gRNA target site sequence
acacaaggtcatttgctaac

SEQ ID NO: 1694 - DNA, 20 bp, Unknown
  Description of Unknown: gRNA target site sequence
aggtcatttgctaactagct

SEQ ID NO: 1695 - DNA, 20 bp, Unknown
  Description of Unknown: gRNA target site sequence
ttgctaactagcttggaaac

SEQ ID NO: 1696 - DNA, 20 bp, Unknown
  Description of Unknown: gRNA target site sequence
aactagcttggaaactggat

SEQ ID NO: 1697 - DNA, 20 bp, Unknown
  Description of Unknown: gRNA target site sequence
actagcttggaaactggatg

SEQ ID NO: 1698 - DNA, 20 bp, Unknown
  Description of Unknown: gRNA target site sequence
ttggaaactggatgaggtca

SEQ ID NO: 1699 - DNA, 20 bp, Unknown
  Description of Unknown: gRNA target site sequence
gaaactggatgaggtcatag

SEQ ID NO: 1700 - DNA, 20 bp, Unknown
  Description of Unknown: gRNA target site sequence
catagcagtgcttgattgcg

SEQ ID NO: 1701 - DNA, 20 bp, Unknown
  Description of Unknown: gRNA target site sequence
tgattgcgtggaattgtgct

SEQ ID NO: 1702 - DNA, 20 bp, Unknown
  Description of Unknown: gRNA target site sequence
tgcgtggaattgtgctgagt

SEQ ID NO: 1703 - DNA, 20 bp, Unknown
  Description of Unknown: gRNA target site sequence
gttggtgttgacatgtgctt

SEQ ID NO: 1704 - DNA, 20 bp, Unknown
  Description of Unknown: gRNA target site sequence
ttggtgttgacatgtgcttt

SEQ ID NO: 1705 - DNA, 20 bp, Unknown
  Description of Unknown: gRNA target site sequence
tggtgttgacatgtgctttg

SEQ ID NO: 1706 - DNA, 20 bp, Unknown
  Description of Unknown: gRNA target site sequence
gtgctttggggcttttacac

SEQ ID NO: 1707 - DNA, 20 bp, Unknown
  Description of Unknown: gRNA target site sequence
tttacaccagttcctttcaa

SEQ ID NO: 1708 - DNA, 20 bp, Unknown
  Description of Unknown: gRNA target site sequence
agttcctttcaatggtttgc

SEQ ID NO: 1709 - DNA, 20 bp, Unknown
  Description of Unknown: gRNA target site sequence
gttcctttcaatggtttgca

SEQ ID NO: 1710 - DNA, 20 bp, Unknown
  Description of Unknown: gRNA target site sequence
cctttcaatggtttgcaagg

SEQ ID NO: 1711 - DNA, 20 bp, Unknown
  Description of Unknown: gRNA target site sequence
aatggtttgcaaggaagcca

SEQ ID NO: 1712 - DNA, 20 bp, Unknown
  Description of Unknown: gRNA target site sequence
gtttgcaaggaagccacagc

SEQ ID NO: 1713 - DNA, 20 bp, Unknown
  Description of Unknown: gRNA target site sequence
tgcaaggaagccacagctgg

SEQ ID NO: 1714 - DNA, 20 bp, Unknown
  Description of Unknown: gRNA target site sequence
agccacagctggtggtatct

SEQ ID NO: 1715 - DNA, 20 bp, Unknown
  Description of Unknown: gRNA target site sequence
tggtatctgagttgacttga

SEQ ID NO: 1716 - DNA, 20 bp, Unknown
  Description of Unknown: gRNA target site sequence
cttgacagaacactgtcttg

SEQ ID NO: 1717 - DNA, 20 bp, Unknown
  Description of Unknown: gRNA target site sequence
gaacactgtcttgaagacaa

SEQ ID NO: 1718 - DNA, 20 bp, Unknown
  Description of Unknown: gRNA target site sequence
ttgaagacaatggcttactc

SEQ ID NO: 1719 - DNA, 20 bp, Unknown
  Description of Unknown: gRNA target site sequence
tgaagacaatggcttactcc

SEQ ID NO: 1720 - DNA, 20 bp, Unknown
  Description of Unknown: gRNA target site sequence
aagacaatggcttactccag

SEQ ID NO: 1721 - DNA, 20 bp, Unknown
  Description of Unknown: gRNA target site sequence
ggcttactccaggagaccca

SEQ ID NO: 1722 - DNA, 20 bp, Unknown
  Description of Unknown: gRNA target site sequence
gcttactccaggagacccac

SEQ ID NO: 1723 - DNA, 20 bp, Unknown
  Description of Unknown: gRNA target site sequence
gacccacaggtatgaccttc

SEQ ID NO: 1724 - DNA, 20 bp, Unknown
  Description of Unknown: gRNA target site sequence
acccacaggtatgaccttct

SEQ ID NO: 1725 - DNA, 20 bp, Unknown
  Description of Unknown: gRNA target site sequence
cacaggtatgaccttctagg

SEQ ID NO: 1726 - DNA, 20 bp, Unknown
  Description of Unknown: gRNA target site sequence
tatgaccttctaggaagctc

SEQ ID NO: 1727 - DNA, 20 bp, Unknown
  Description of Unknown: gRNA target site sequence
tctaggaagctccagttcga

SEQ ID NO: 1728 - DNA, 20 bp, Unknown
  Description of Unknown: gRNA target site sequence
ctaggaagctccagttcgat

SEQ ID NO: 1729 - DNA, 20 bp, Unknown
  Description of Unknown: gRNA target site sequence
gcccaattcttacaaacatg

SEQ ID NO: 1730 - DNA, 20 bp, Unknown
  Description of Unknown: gRNA target site sequence
caaacatgtggttaatgcca

SEQ ID NO: 1731 - DNA, 20 bp, Unknown
  Description of Unknown: gRNA target site sequence
catgtggttaatgccatgga

SEQ ID NO: 1732 - DNA, 20 bp, Unknown
  Description of Unknown: gRNA target site sequence
gtggttaatgccatggacag

SEQ ID NO: 1733 - DNA, 20 bp, Unknown
  Description of Unknown: gRNA target site sequence
gttaatgccatggacagaag

SEQ ID NO: 1734 - DNA, 20 bp, Unknown
  Description of Unknown: gRNA target site sequence
ttaatgccatggacagaaga

SEQ ID NO: 1735 - DNA, 20 bp, Unknown
  Description of Unknown: gRNA target site sequence
atgccatggacagaagaagg

SEQ ID NO: 1736 - DNA, 20 bp, Unknown
  Description of Unknown: gRNA target site sequence
ccatggacagaagaaggcag

SEQ ID NO: 1737 - DNA, 20 bp, Unknown
  Description of Unknown: gRNA target site sequence
catggacagaagaaggcagc

SEQ ID NO: 1738 - DNA, 20 bp, Unknown
  Description of Unknown: gRNA target site sequence
ggacagaagaaggcagcagg

SEQ ID NO: 1739 - DNA, 20 bp, Unknown
  Description of Unknown: gRNA target site sequence
cagaagaaggcagcaggtgg

SEQ ID NO: 1740 - DNA, 20 bp, Unknown
  Description of Unknown: gRNA target site sequence
gaaggcagcaggtggcagaa

SEQ ID NO: 1741 - DNA, 20 bp, Unknown
  Description of Unknown: gRNA target site sequence
aaggcagcaggtggcagaat

SEQ ID NO: 1742 - DNA, 20 bp, Unknown
  Description of Unknown: gRNA target site sequence
aggcagcaggtggcagaatg

SEQ ID NO: 1743 - DNA, 20 bp, Unknown
  Description of Unknown: gRNA target site sequence
gtggcagaatggggtgcatg

SEQ ID NO: 1744 - DNA, 20 bp, Unknown
  Description of Unknown: gRNA target site sequence
tggcagaatggggtgcatga

SEQ ID NO: 1745 - DNA, 20 bp, Unknown
  Description of Unknown: gRNA target site sequence
tttaattaaataaaaatctg

SEQ ID NO: 1746 - DNA, 20 bp, Unknown
  Description of Unknown: gRNA target site sequence
aattaaataaaaatctgtgg

SEQ ID NO: 1747 - DNA, 20 bp, Unknown
  Description of Unknown: gRNA target site sequence
aatctgtggtggtcgttttc

SEQ ID NO: 1748 - DNA, 20 bp, Unknown
  Description of Unknown: gRNA target site sequence
tctgtggtggtcgttttccg

SEQ ID NO: 1749 - DNA, 20 bp, Unknown
  Description of Unknown: gRNA target site sequence
aaatttttgattgattcatt

SEQ ID NO: 1750 - DNA, 20 bp, Unknown
  Description of Unknown: gRNA target site sequence
tgattgattcattcagtatc

SEQ ID NO: 1751 - DNA, 20 bp, Unknown
  Description of Unknown: gRNA target site sequence
ttgattcattcagtatctgg

SEQ ID NO: 1752 - DNA, 20 bp, Unknown
  Description of Unknown: gRNA target site sequence
gattcattcagtatctggtg

SEQ ID NO: 1753 - DNA, 20 bp, Unknown
  Description of Unknown: gRNA target site sequence
tctggtggagtctccaatat

SEQ ID NO: 1754 - DNA, 20 bp, Unknown
  Description of Unknown: gRNA target site sequence
gtctccaatattagaaatac

SEQ ID NO: 1755 - DNA, 20 bp, Unknown
  Description of Unknown: gRNA target site sequence
aacaaactgaaaaaccacaa

SEQ ID NO: 1756 - DNA, 20 bp, Unknown
  Description of Unknown: gRNA target site sequence
acaaactgaaaaaccacaaa

SEQ ID NO: 1757 - DNA, 20 bp, Unknown
  Description of Unknown: gRNA target site sequence
aaggacaaataatgcttcat

SEQ ID NO: 1758 - DNA, 20 bp, Unknown
  Description of Unknown: gRNA target site sequence
acaaataatgcttcatgagt

SEQ ID NO: 1759 - DNA, 20 bp, Unknown
  Description of Unknown: gRNA target site sequence
ttcatgagtcagctttgcac

SEQ ID NO: 1760 - DNA, 20 bp, Unknown
  Description of Unknown: gRNA target site sequence
ttgcaccagccattacctgc

SEQ ID NO: 1761 - DNA, 20 bp, Unknown
  Description of Unknown: gRNA target site sequence
cattacctgcaagtcattct

SEQ ID NO: 1762 - DNA, 20 bp, Unknown
  Description of Unknown: gRNA target site sequence
tacctgcaagtcattcttgg

SEQ ID NO: 1763 - DNA, 20 bp, Unknown
  Description of Unknown: gRNA target site sequence
acctgcaagtcattcttgga

SEQ ID NO: 1764 - DNA, 20 bp, Unknown
  Description of Unknown: gRNA target site sequence
ttgatttcttcaccactatt

SEQ ID NO: 1765 - DNA, 20 bp, Unknown
  Description of Unknown: gRNA target site sequence
tgatttcttcaccactattt

SEQ ID NO: 1766 - DNA, 20 bp, Unknown
  Description of Unknown: gRNA target site sequence
ccactatttgggatataacg

SEQ ID NO: 1767 - DNA, 20 bp, Unknown
  Description of Unknown: gRNA target site sequence
cactatttgggatataacgt

SEQ ID NO: 1768 - DNA, 20 bp, Unknown
  Description of Unknown: gRNA target site sequence
ggatataacgtgggttaaca

SEQ ID NO: 1769 - DNA, 20 bp, Unknown
  Description of Unknown: gRNA target site sequence
aacgtgggttaacacagaca

SEQ ID NO: 1770 - DNA, 20 bp, Unknown
  Description of Unknown: gRNA target site sequence
gtgggttaacacagacatag

SEQ ID NO: 1771 - DNA, 20 bp, Unknown
  Description of Unknown: gRNA target site sequence
gcagtcctttataaatcaat

SEQ ID NO: 1772 - DNA, 20 bp, Unknown
  Description of Unknown: gRNA target site sequence
aattggcatgctgtttaaca

SEQ ID NO: 1773 - DNA, 20 bp, Unknown
  Description of Unknown: gRNA target site sequence
attggcatgctgtttaacac

SEQ ID NO: 1774 - DNA, 20 bp, Unknown
  Description of Unknown: gRNA target site sequence
tttcttaccgcctgctttct

SEQ ID NO: 1775 - DNA, 20 bp, Unknown
  Description of Unknown: gRNA target site sequence
ctttctcagctcaactatca

SEQ ID NO: 1776 - DNA, 20 bp, Unknown
  Description of Unknown: gRNA target site sequence
tttctcagctcaactatcac

SEQ ID NO: 1777 - DNA, 20 bp, Unknown
  Description of Unknown: gRNA target site sequence
ctcaactatcacaggcatta

SEQ ID NO: 1778 - DNA, 20 bp, Unknown
  Description of Unknown: gRNA target site sequence
cacaggcattacagttgtca

SEQ ID NO: 1779 - DNA, 20 bp, Unknown
  Description of Unknown: gRNA target site sequence
tgtcatggcaaccccaatgt

SEQ ID NO: 1780 - DNA, 20 bp, Unknown
  Description of Unknown: gRNA target site sequence
gttggcaaccacgtcccttg

SEQ ID NO: 1781 - DNA, 20 bp, Unknown
  Description of Unknown: gRNA target site sequence
tgatctgccttcctgaaata

SEQ ID NO: 1782 - DNA, 20 bp, Unknown
  Description of Unknown: gRNA target site sequence
atctgccttcctgaaatata

SEQ ID NO: 1783 - DNA, 20 bp, Unknown
  Description of Unknown: gRNA target site sequence
aaatatagagcttttccctg

SEQ ID NO: 1784 - DNA, 20 bp, Unknown
  Description of Unknown: gRNA target site sequence
aatgaactattttgcaaatg

SEQ ID NO: 1785 - DNA, 20 bp, Unknown
  Description of Unknown: gRNA target site sequence
atgaactattttgcaaatgt

SEQ ID NO: 1786 - DNA, 20 bp, Unknown
  Description of Unknown: gRNA target site sequence
tgaactattttgcaaatgtg

SEQ ID NO: 1787 - DNA, 20 bp, Unknown
  Description of Unknown: gRNA target site sequence
gtggggaaaacacacacctg

SEQ ID NO: 1788 - DNA, 20 bp, Unknown
  Description of Unknown: gRNA target site sequence
ttttccccacatttgcaaaa

SEQ ID NO: 1789 - DNA, 20 bp, Unknown
  Description of Unknown: gRNA target site sequence
catttgcaaaatagttcatt

SEQ ID NO: 1790 - DNA, 20 bp, Unknown
  Description of Unknown: gRNA target site sequence
ttgcaaaatagttcatttgg

SEQ ID NO: 1791 - DNA, 20 bp, Unknown
  Description of Unknown: gRNA target site sequence
aatagttcatttggaagcca

SEQ ID NO: 1792 - DNA, 20 bp, Unknown
  Description of Unknown: gRNA target site sequence
atagttcatttggaagccac

SEQ ID NO: 1793 - DNA, 20 bp, Unknown
  Description of Unknown: gRNA target site sequence
tagttcatttggaagccaca

SEQ ID NO: 1794 - DNA, 20 bp, Unknown
  Description of Unknown: gRNA target site sequence
catttggaagccacagggaa

SEQ ID NO: 1795 - DNA, 20 bp, Unknown
  Description of Unknown: gRNA target site sequence
cagggaaaagctctatattt

SEQ ID NO: 1796 - DNA, 20 bp, Unknown
  Description of Unknown: gRNA target site sequence
agggaaaagctctatatttc

SEQ ID NO: 1797 - DNA, 20 bp, Unknown
  Description of Unknown: gRNA target site sequence
gaaaagctctatatttcagg

SEQ ID NO: 1798 - DNA, 20 bp, Unknown
  Description of Unknown: gRNA target site sequence
aaaagctctatatttcagga

SEQ ID NO: 1799 - DNA, 20 bp, Unknown
  Description of Unknown: gRNA target site sequence
agctctatatttcaggaagg

SEQ ID NO: 1800 - DNA, 20 bp, Unknown
  Description of Unknown: gRNA target site sequence
ttcaggaaggcagatcaaaa

SEQ ID NO: 1801 - DNA, 20 bp, Unknown
  Description of Unknown: gRNA target site sequence
aggcagatcaaaatggctgc

SEQ ID NO: 1802 - DNA, 20 bp, Unknown
  Description of Unknown: gRNA target site sequence
ggcagatcaaaatggctgca

SEQ ID NO: 1803 - DNA, 20 bp, Unknown
  Description of Unknown: gRNA target site sequence
gcagatcaaaatggctgcaa

SEQ ID NO: 1804 - DNA, 20 bp, Unknown
  Description of Unknown: gRNA target site sequence
caaaatggctgcaagggacg

SEQ ID NO: 1805 - DNA, 20 bp, Unknown
  Description of Unknown: gRNA target site sequence
agggacgtggttgccaacat

SEQ ID NO: 1806 - DNA, 20 bp, Unknown
  Description of Unknown: gRNA target site sequence
gggacgtggttgccaacatt

SEQ ID NO: 1807 - DNA, 20 bp, Unknown
  Description of Unknown: gRNA target site sequence
ggacgtggttgccaacattg

SEQ ID NO: 1808 - DNA, 20 bp, Unknown
  Description of Unknown: gRNA target site sequence
gacaactgtaatgcctgtga

SEQ ID NO: 1809 - DNA, 20 bp, Unknown
  Description of Unknown: gRNA target site sequence
ctgtaatgcctgtgatagtt

SEQ ID NO: 1810 - DNA, 20 bp, Unknown
  Description of Unknown: gRNA target site sequence
atgcctgtgatagttgagct

SEQ ID NO: 1811 - DNA, 20 bp, Unknown
  Description of Unknown: gRNA target site sequence
ctgtgatagttgagctgaga

SEQ ID NO: 1812 - DNA, 20 bp, Unknown
  Description of Unknown: gRNA target site sequence
tgatagttgagctgagaaag

SEQ ID NO: 1813 - DNA, 20 bp, Unknown
  Description of Unknown: gRNA target site sequence
gatagttgagctgagaaagc

SEQ ID NO: 1814 - DNA, 20 bp, Unknown
  Description of Unknown: gRNA target site sequence
agttgagctgagaaagcagg

SEQ ID NO: 1815 - DNA, 20 bp, Unknown
  Description of Unknown: gRNA target site sequence
gagctgagaaagcaggcggt

SEQ ID NO: 1816 - DNA, 20 bp, Unknown
  Description of Unknown: gRNA target site sequence
tgagaaagcaggcggtaaga

SEQ ID NO: 1817 - DNA, 20 bp, Unknown
  Description of Unknown: gRNA target site sequence
gagaaagcaggcggtaagaa

SEQ ID NO: 1818 - DNA, 20 bp, Unknown
  Description of Unknown: gRNA target site sequence
agaaagcaggcggtaagaaa

SEQ ID NO: 1819 - DNA, 20 bp, Unknown
  Description of Unknown: gRNA target site sequence
gaaagcaggcggtaagaaag

SEQ ID NO: 1820 - DNA, 20 bp, Unknown
  Description of Unknown: gRNA target site sequence
aagcaggcggtaagaaaggg

SEQ ID NO: 1821 - DNA, 20 bp, Unknown
  Description of Unknown: gRNA target site sequence
agcaggcggtaagaaagggg

SEQ ID NO: 1822 - DNA, 20 bp, Unknown
  Description of Unknown: gRNA target site sequence
gcggtaagaaaggggaggtg

SEQ ID NO: 1823 - DNA, 20 bp, Unknown
  Description of Unknown: gRNA target site sequence
ggtgaagaacctgtgttaaa

SEQ ID NO: 1824 - DNA, 20 bp, Unknown
  Description of Unknown: gRNA target site sequence
agcatgccaattgatttata

SEQ ID NO: 1825 - DNA, 20 bp, Unknown
  Description of Unknown: gRNA target site sequence
gcatgccaattgatttataa

SEQ ID NO: 1826 - DNA, 20 bp, Unknown
  Description of Unknown: gRNA target site sequence
aacccacgttatatcccaaa

SEQ ID NO: 1827 - DNA, 20 bp, Unknown
  Description of Unknown: gRNA target site sequence
ccacgttatatcccaaatag

SEQ ID NO: 1828 - DNA, 20 bp, Unknown
  Description of Unknown: gRNA target site sequence
ttatatcccaaatagtggtg

SEQ ID NO: 1829 - DNA, 20 bp, Unknown
  Description of Unknown: gRNA target site sequence
aatagtggtgaagaaatcaa

SEQ ID NO: 1830 - DNA, 20 bp, Unknown
  Description of Unknown: gRNA target site sequence
atagtggtgaagaaatcaaa

SEQ ID NO: 1831 - DNA, 20 bp, Unknown
  Description of Unknown: gRNA target site sequence
tggtgaagaaatcaaaagga

SEQ ID NO: 1832 - DNA, 20 bp, Unknown
  Description of Unknown: gRNA target site sequence
gtgaagaaatcaaaaggaaa

SEQ ID NO: 1833 - DNA, 20 bp, Unknown
  Description of Unknown: gRNA target site sequence
tgaagaaatcaaaaggaaag

SEQ ID NO: 1834 - DNA, 20 bp, Unknown
  Description of Unknown: gRNA target site sequence
gaaatcaaaaggaaagagga

SEQ ID NO: 1835 - DNA, 20 bp, Unknown
  Description of Unknown: gRNA target site sequence
aaagaggatggataccttcc

SEQ ID NO: 1836 - DNA, 20 bp, Unknown
  Description of Unknown: gRNA target site sequence
taccttccaagaatgacttg

SEQ ID NO: 1837 - DNA, 20 bp, Unknown
  Description of Unknown: gRNA target site sequence
accttccaagaatgacttgc

SEQ ID NO: 1838 - DNA, 20 bp, Unknown
  Description of Unknown: gRNA target site sequence
caagaatgacttgcaggtaa

SEQ ID NO: 1839 - DNA, 20 bp, Unknown
  Description of Unknown: gRNA target site sequence
aatgacttgcaggtaatggc

SEQ ID NO: 1840 - DNA, 20 bp, Unknown
  Description of Unknown: gRNA target site sequence
tgcaggtaatggctggtgca

SEQ ID NO: 1841 - DNA, 20 bp, Unknown
  Description of Unknown: gRNA target site sequence
tggtgcaaagctgactcatg

SEQ ID NO: 1842 - DNA, 20 bp, Unknown
  Description of Unknown: gRNA target site sequence
aagcattatttgtccttttg

SEQ ID NO: 1843 - DNA, 20 bp, Unknown
  Description of Unknown: gRNA target site sequence
tttgtccttttgtggttttt

SEQ ID NO: 1844 - DNA, 20 bp, Unknown
  Description of Unknown: gRNA target site sequence
gtggtttttcagtttgtttc

SEQ ID NO: 1845 - DNA, 20 bp, Unknown
  Description of Unknown: gRNA target site sequence
gtttccagtatttctaatat

SEQ ID NO: 1846 - DNA, 20 bp, Unknown
  Description of Unknown: gRNA target site sequence
ttccagtatttctaatattg

SEQ ID NO: 1847 - DNA, 20 bp, Unknown
  Description of Unknown: gRNA target site sequence
tctaatattggagactccac

SEQ ID NO: 1848 - DNA, 20 bp, Unknown
  Description of Unknown: gRNA target site sequence
tgaacacaatattcaaatgc

SEQ ID NO: 1849 - DNA, 20 bp, Unknown
  Description of Unknown: gRNA target site sequence
gaacacaatattcaaatgca

SEQ ID NO: 1850 - DNA, 20 bp, Unknown
  Description of Unknown: gRNA target site sequence
attcaaatgcaaggatgata

SEQ ID NO: 1851 - DNA, 20 bp, Unknown
  Description of Unknown: gRNA target site sequence
aaggatgataaagacaactc

SEQ ID NO: 1852 - DNA, 20 bp, Unknown
  Description of Unknown: gRNA target site sequence
actccggaaaacgaccacca

SEQ ID NO: 1853 - DNA, 20 bp, Unknown
  Description of Unknown: gRNA target site sequence
tacatgttgttgcattttca

SEQ ID NO: 1854 - DNA, 20 bp, Unknown
  Description of Unknown: gRNA target site sequence
gcattttcatggaaaatatt

SEQ ID NO: 1855 - DNA, 20 bp, Unknown
  Description of Unknown: gRNA target site sequence
aaatattgagttaaaaacac

SEQ ID NO: 1856 - DNA, 20 bp, Unknown
  Description of Unknown: gRNA target site sequence
tattgagttaaaaacacaag

SEQ ID NO: 1857 - DNA, 20 bp, Unknown
  Description of Unknown: gRNA target site sequence
acacaagcagtgttaatttt

SEQ ID NO: 1858 - DNA, 20 bp, Unknown
  Description of Unknown: gRNA target site sequence
ctgctgccttcttctgtcca

SEQ ID NO: 1859 - DNA, 20 bp, Unknown
  Description of Unknown: gRNA target site sequence
ggcattaaccacatgtttgt

SEQ ID NO: 1860 - DNA, 20 bp, Unknown
  Description of Unknown: gRNA target site sequence
aaccacatgtttgtaagaat

SEQ ID NO: 1861 - DNA, 20 bp, Unknown
  Description of Unknown: gRNA target site sequence
accacatgtttgtaagaatt

SEQ ID NO: 1862 - DNA, 20 bp, Unknown
  Description of Unknown: gRNA target site sequence
aagaattgggcccatcgaac

SEQ ID NO: 1863 - DNA, 20 bp, Unknown
  Description of Unknown: gRNA target site sequence
gaattgggcccatcgaactg

SEQ ID NO: 1864 - DNA, 20 bp, Unknown
  Description of Unknown: gRNA target site sequence
cccatcgaactggagcttcc

SEQ ID NO: 1865 - DNA, 20 bp, Unknown
  Description of Unknown: gRNA target site sequence
atcgaactggagcttcctag

SEQ ID NO: 1866 - DNA, 20 bp, Unknown
  Description of Unknown: gRNA target site sequence
tcgaactggagcttcctaga

SEQ ID NO: 1867 - DNA, 20 bp, Unknown
  Description of Unknown: gRNA target site sequence
ttcctagaaggtcatacctg

SEQ ID NO: 1868 - DNA, 20 bp, Unknown
  Description of Unknown: gRNA target site sequence
tcctagaaggtcatacctgt

SEQ ID NO: 1869 - DNA, 20 bp, Unknown
  Description of Unknown: gRNA target site sequence
ggtcatacctgtgggtctcc

SEQ ID NO: 1870 - DNA, 20 bp, Unknown
  Description of Unknown: gRNA target site sequence
tcatacctgtgggtctcctg

SEQ ID NO: 1871 - DNA, 20 bp, Unknown
  Description of Unknown: gRNA target site sequence
acctgtgggtctcctggagt

SEQ ID NO: 1872 - DNA, 20 bp, Unknown
  Description of Unknown: gRNA target site sequence
tggagtaagccattgtcttc

SEQ ID NO: 1873 - DNA, 20 bp, Unknown
  Description of Unknown: gRNA target site sequence
gtaagccattgtcttcaaga

SEQ ID NO: 1874 - DNA, 20 bp, Unknown
  Description of Unknown: gRNA target site sequence
cttcaagacagtgttctgtc

SEQ ID NO: 1875 - DNA, 20 bp, Unknown
  Description of Unknown: gRNA target site sequence
agtgttctgtcaagtcaact

SEQ ID NO: 1876 - DNA, 20 bp, Unknown
  Description of Unknown: gRNA target site sequence
caagtcaactcagataccac

SEQ ID NO: 1877 - DNA, 20 bp, Unknown
  Description of Unknown: gRNA target site sequence
aactcagataccaccagctg

SEQ ID NO: 1878 - DNA, 20 bp, Unknown
  Description of Unknown: gRNA target site sequence
gcttccttgcaaaccattga

SEQ ID NO: 1879 - DNA, 20 bp, Unknown
  Description of Unknown: gRNA target site sequence
cttccttgcaaaccattgaa

SEQ ID NO: 1880 - DNA, 20 bp, Unknown
  Description of Unknown: gRNA target site sequence
tgcaaaccattgaaaggaac

SEQ ID NO: 1881 - DNA, 20 bp, Unknown
  Description of Unknown: gRNA target site sequence
attgaaaggaactggtgtaa

SEQ ID NO: 1882 - DNA, 20 bp, Unknown
  Description of Unknown: gRNA target site sequence
gaactggtgtaaaagcccca

SEQ ID NO: 1883 - DNA, 20 bp, Unknown
  Description of Unknown: gRNA target site sequence
agcacatgtcaacaccaact

SEQ ID NO: 1884 - DNA, 20 bp, Unknown
  Description of Unknown: gRNA target site sequence
cagcacaattccacgcaatc

SEQ ID NO: 1885 - DNA, 20 bp, Unknown
  Description of Unknown: gRNA target site sequence
agcactgctatgacctcatc

SEQ ID NO: 1886 - DNA, 20 bp, Unknown
  Description of Unknown: gRNA target site sequence
tatgacctcatccagtttcc

SEQ ID NO: 1887 - DNA, 20 bp, Unknown
  Description of Unknown: gRNA target site sequence
acctcatccagtttccaagc

SEQ ID NO: 1888 - DNA, 20 bp, Unknown
  Description of Unknown: gRNA target site sequence
catccagtttccaagctagt

SEQ ID NO: 1889 - DNA, 20 bp, Unknown
  Description of Unknown: gRNA target site sequence
aaatgaccttgtgttctacc

SEQ ID NO: 1890 - DNA, 20 bp, Unknown
  Description of Unknown: gRNA target site sequence
ttgtgttctacctggtgtat

SEQ ID NO: 1891 - DNA, 20 bp, Unknown
  Description of Unknown: gRNA target site sequence
acctggtgtattagtgtcct

SEQ ID NO: 1892 - DNA, 20 bp, Unknown
  Description of Unknown: gRNA target site sequence
gctcctccacaaaacttccc

SEQ ID NO: 1893 - DNA, 20 bp, Unknown
  Description of Unknown: gRNA target site sequence
ctcctccacaaaacttccct

SEQ ID NO: 1894 - DNA, 20 bp, Unknown
  Description of Unknown: gRNA target site sequence
acaaaacttccctgggaccc

SEQ ID NO: 1895 - DNA, 20 bp, Unknown
  Description of Unknown: gRNA target site sequence
caaaacttccctgggaccca

SEQ ID NO: 1896 - DNA, 20 bp, Unknown
  Description of Unknown: gRNA target site sequence
aacttccctgggacccaagg

SEQ ID NO: 1897 - DNA, 20 bp, Unknown
  Description of Unknown: gRNA target site sequence
tccctgggacccaaggtgga

SEQ ID NO: 1898 - DNA, 20 bp, Unknown
  Description of Unknown: gRNA target site sequence
ggtggaaagacactgccata

SEQ ID NO: 1899 - DNA, 20 bp, Unknown
  Description of Unknown: gRNA target site sequence
caaatacacaaaaacatacg

SEQ ID NO: 1900 - DNA, 20 bp, Unknown
  Description of Unknown: gRNA target site sequence
tatatatgcaatacaacctt

SEQ ID NO: 1901 - DNA, 20 bp, Unknown
  Description of Unknown: gRNA target site sequence
aatacaacctttagcatcac

SEQ ID NO: 1902 - DNA, 20 bp, Unknown
  Description of Unknown: gRNA target site sequence
tagcatcactggctaaaaca

SEQ ID NO: 1903 - DNA, 20 bp, Unknown
  Description of Unknown: gRNA target site sequence
tggctaaaacatagccatgt

SEQ ID NO: 1904 - DNA, 20 bp, Unknown
  Description of Unknown: gRNA target site sequence
tagccatgtgagtatttttg

SEQ ID NO: 1905 - DNA, 20 bp, Unknown
  Description of Unknown: gRNA target site sequence
atgtaatcatacatttgttt

SEQ ID NO: 1906 - DNA, 20 bp, Unknown
  Description of Unknown: gRNA target site sequence
tacatttgtttaagaaataa

SEQ ID NO: 1907 - DNA, 20 bp, Unknown
  Description of Unknown: gRNA target site sequence
acatttgtttaagaaataaa

SEQ ID NO: 1908 - DNA, 20 bp, Unknown
  Description of Unknown: gRNA target site sequence
ggcataaaatttaacttgaa

SEQ ID NO: 1909 - DNA, 20 bp, Unknown
  Description of Unknown: gRNA target site sequence
ttaacttgaaaagatcattt

SEQ ID NO: 1910 - DNA, 20 bp, Unknown
  Description of Unknown: gRNA target site sequence
aacgtctcatacgtaaatat

SEQ ID NO: 1911 - DNA, 20 bp, Unknown
  Description of Unknown: gRNA target site sequence
acgtctcatacgtaaatata

SEQ ID NO: 1912 - DNA, 20 bp, Unknown
  Description of Unknown: gRNA target site sequence
aatataaggtgtgtacaata

SEQ ID NO: 1913 - DNA, 20 bp, Unknown
  Description of Unknown: gRNA target site sequence
ctccctgccttttccttctt

SEQ ID NO: 1914 - DNA, 20 bp, Unknown
  Description of Unknown: gRNA target site sequence
tccctgccttttccttcttt

SEQ ID NO: 1915 - DNA, 20 bp, Unknown
  Description of Unknown: gRNA target site sequence
tgcatccccatattaatccc

SEQ ID NO: 1916 - DNA, 20 bp, Unknown
  Description of Unknown: gRNA target site sequence
ccaagtgatgctttcactga

SEQ ID NO: 1917 - DNA, 20 bp, Unknown
  Description of Unknown: gRNA target site sequence
agtgatgctttcactgaaag

SEQ ID NO: 1918 - DNA, 20 bp, Unknown
  Description of Unknown: gRNA target site sequence
tgatgctttcactgaaagtg

SEQ ID NO: 1919 - DNA, 20 bp, Unknown
  Description of Unknown: gRNA target site sequence
tgaaagtggagctgatgtga

SEQ ID NO: 1920 - DNA, 20 bp, Unknown
  Description of Unknown: gRNA target site sequence
ctgatgtgacagaaacatcc

SEQ ID NO: 1921 - DNA, 20 bp, Unknown
  Description of Unknown: gRNA target site sequence
tactcctttgctttaaattg

SEQ ID NO: 1922 - DNA, 20 bp, Unknown
  Description of Unknown: gRNA target site sequence
aaattgtagtacacgtaatt

SEQ ID NO: 1923 - DNA, 20 bp, Unknown
  Description of Unknown: gRNA target site sequence
aattgtagtacacgtaattt

SEQ ID NO: 1924 - DNA, 20 bp, Unknown
  Description of Unknown: gRNA target site sequence
ccgcatccaactttatatta

SEQ ID NO: 1925 - DNA, 20 bp, Unknown
  Description of Unknown: gRNA target site sequence
gcatccaactttatattaaa

SEQ ID NO: 1926 - DNA, 20 bp, Unknown
  Description of Unknown: gRNA target site sequence
atccaactttatattaaaga

SEQ ID NO: 1927 - DNA, 20 bp, Unknown
  Description of Unknown: gRNA target site sequence
aatgcacaaacaaataaaaa

SEQ ID NO: 1928 - DNA, 20 bp, Unknown
  Description of Unknown: gRNA target site sequence
cacaaacaaataaaaatagc

SEQ ID NO: 1929 - DNA, 20 bp, Unknown
  Description of Unknown: gRNA target site sequence
aacaaataaaaatagctgga

SEQ ID NO: 1930 - DNA, 20 bp, Unknown
  Description of Unknown: gRNA target site sequence
aaaatagctggatagcaaaa

SEQ ID NO: 1931 - DNA, 20 bp, Unknown
  Description of Unknown: gRNA target site sequence
tagctggatagcaaaaaagt

SEQ ID NO: 1932 - DNA, 20 bp, Unknown
  Description of Unknown: gRNA target site sequence
caaaaaagttagaattgcct

SEQ ID NO: 1933 - DNA, 20 bp, Unknown
  Description of Unknown: gRNA target site sequence
gttagaattgcctcagctct

SEQ ID NO: 1934 - DNA, 20 bp, Unknown
  Description of Unknown: gRNA target site sequence
agctcttggaaattgaaata

SEQ ID NO: 1935 - DNA, 20 bp, Unknown
  Description of Unknown: gRNA target site sequence
atggactctcttcttcataa

SEQ ID NO: 1936 - DNA, 20 bp, Unknown
  Description of Unknown: gRNA target site sequence
cataatggtttctcaattga

SEQ ID NO: 1937 - DNA, 20 bp, Unknown
  Description of Unknown: gRNA target site sequence
ataatggtttctcaattgat

SEQ ID NO: 1938 - DNA, 20 bp, Unknown
  Description of Unknown: gRNA target site sequence
tcaattgatgggaataaaat

SEQ ID NO: 1939 - DNA, 20 bp, Unknown
  Description of Unknown: gRNA target site sequence
caattgatgggaataaaata

SEQ ID NO: 1940 - DNA, 20 bp, Unknown
  Description of Unknown: gRNA target site sequence
tgaaattgcttttcacattc

SEQ ID NO: 1941 - DNA, 20 bp, Unknown
  Description of Unknown: gRNA target site sequence
ttttcacattctggctctgt

SEQ ID NO: 1942 - DNA, 20 bp, Unknown
  Description of Unknown: gRNA target site sequence
tttcacattctggctctgtt

SEQ ID NO: 1943 - DNA, 20 bp, Unknown
  Description of Unknown: gRNA target site sequence
ttcacattctggctctgttg

SEQ ID NO: 1944 - DNA, 20 bp, Unknown
  Description of Unknown: gRNA target site sequence
tcacattctggctctgttgg

SEQ ID NO: 1945 - DNA, 20 bp, Unknown
  Description of Unknown: gRNA target site sequence
ctgttgggggcattttcaca

SEQ ID NO: 1946 - DNA, 20 bp, Unknown
  Description of Unknown: gRNA target site sequence
ttcacatagacccctgttgt

SEQ ID NO: 1947 - DNA, 20 bp, Unknown
  Description of Unknown: gRNA target site sequence
cacatagacccctgttgtaa

SEQ ID NO: 1948 - DNA, 20 bp, Unknown
  Description of Unknown: gRNA target site sequence
acatagacccctgttgtaag

SEQ ID NO: 1949 - DNA, 20 bp, Unknown
  Description of Unknown: gRNA target site sequence
catagacccctgttgtaaga

SEQ ID NO: 1950 - DNA, 20 bp, Unknown
  Description of Unknown: gRNA target site sequence
gtaagagggcttcttttctt

SEQ ID NO: 1951 - DNA, 20 bp, Unknown
  Description of Unknown: gRNA target site sequence
ctttagctgtcaaacacaaa

SEQ ID NO: 1952 - DNA, 20 bp, Unknown
  Description of Unknown: gRNA target site sequence
ctgtcaaacacaaaaagaaa

SEQ ID NO: 1953 - DNA, 20 bp, Unknown
  Description of Unknown: gRNA target site sequence
aagaaacagtaattactact

SEQ ID NO: 1954 - DNA, 20 bp, Unknown
  Description of Unknown: gRNA target site sequence
agaaacagtaattactactg

SEQ ID NO: 1955 - DNA, 20 bp, Unknown
  Description of Unknown: gRNA target site sequence
gtaattactactgaggaata

SEQ ID NO: 1956 - DNA, 20 bp, Unknown
  Description of Unknown: gRNA target site sequence
attactactgaggaatacgg

SEQ ID NO: 1957 - DNA, 20 bp, Unknown
  Description of Unknown: gRNA target site sequence
gaagccacttctaaccataa

SEQ ID NO: 1958 - DNA, 20 bp, Unknown
  Description of Unknown: gRNA target site sequence
taatagaactcaacacatat

SEQ ID NO: 1959 - DNA, 20 bp, Unknown
  Description of Unknown: gRNA target site sequence
aatagaactcaacacatatt

SEQ ID NO: 1960 - DNA, 20 bp, Unknown
  Description of Unknown: gRNA target site sequence
ctcaacacatattgggtccc

SEQ ID NO: 1961 - DNA, 20 bp, Unknown
  Description of Unknown: gRNA target site sequence
acacatattgggtccctagc

SEQ ID NO: 1962 - DNA, 20 bp, Unknown
  Description of Unknown: gRNA target site sequence
tggttaaaaatgaatgttca

SEQ ID NO: 1963 - DNA, 20 bp, Unknown
  Description of Unknown: gRNA target site sequence
aaatgaatgttcacagcata

SEQ ID NO: 1964 - DNA, 20 bp, Unknown
  Description of Unknown: gRNA target site sequence
gcatacagaattataaacct

SEQ ID NO: 1965 - DNA, 20 bp, Unknown
  Description of Unknown: gRNA target site sequence
catacagaattataaacctc

SEQ ID NO: 1966 - DNA, 20 bp, Unknown
  Description of Unknown: gRNA target site sequence
tacagaattataaacctcag

SEQ ID NO: 1967 - DNA, 20 bp, Unknown
  Description of Unknown: gRNA target site sequence
ctcaggagattttcttgatt

SEQ ID NO: 1968 - DNA, 20 bp, Unknown
  Description of Unknown: gRNA target site sequence
tcagctattaaaatttattt

SEQ ID NO: 1969 - DNA, 20 bp, Unknown
  Description of Unknown: gRNA target site sequence
actgtgattttgatgttaaa

SEQ ID NO: 1970 - DNA, 20 bp, Unknown
  Description of Unknown: gRNA target site sequence
tggcaatcatttgccttgaa

SEQ ID NO: 1971 - DNA, 20 bp, Unknown
  Description of Unknown: gRNA target site sequence
caatcatttgccttgaatgg

SEQ ID NO: 1972 - DNA, 20 bp, Unknown
  Description of Unknown: gRNA target site sequence
catttgccttgaatggaaga

SEQ ID NO: 1973 - DNA, 20 bp, Unknown
  Description of Unknown: gRNA target site sequence
atttgccttgaatggaagat

SEQ ID NO: 1974 - DNA, 20 bp, Unknown
  Description of Unknown: gRNA target site sequence
ttgccttgaatggaagatag

SEQ ID NO: 1975 - DNA, 20 bp, Unknown
  Description of Unknown: gRNA target site sequence
cttgaatggaagataggaga

SEQ ID NO: 1976 - DNA, 20 bp, Unknown
  Description of Unknown: gRNA target site sequence
tgaatggaagataggagaaa

SEQ ID NO: 1977 - DNA, 20 bp, Unknown
  Description of Unknown: gRNA target site sequence
agataggagaaagagacttt

SEQ ID NO: 1978 - DNA, 20 bp, Unknown
  Description of Unknown: gRNA target site sequence
aggagaaagagactttgaga

SEQ ID NO: 1979 - DNA, 20 bp, Unknown
  Description of Unknown: gRNA target site sequence
aagagactttgagaaagctt

SEQ ID NO: 1980 - DNA, 20 bp, Unknown
  Description of Unknown: gRNA target site sequence
gactttgagaaagcttcaga

SEQ ID NO: 1981 - DNA, 20 bp, Unknown
  Description of Unknown: gRNA target site sequence
aaagcttcagaaagaacacc

SEQ ID NO: 1982 - DNA, 20 bp, Unknown
  Description of Unknown: gRNA target site sequence
cttcagaaagaacacccaga

SEQ ID NO: 1983 - DNA, 20 bp, Unknown
  Description of Unknown: gRNA target site sequence
aattgatcaatcttgtctgc

SEQ ID NO: 1984 - DNA, 20 bp, Unknown
  Description of Unknown: gRNA target site sequence
attgatcaatcttgtctgca

SEQ ID NO: 1985 - DNA, 20 bp, Unknown
  Description of Unknown: gRNA target site sequence
ttgatcaatcttgtctgcaa

SEQ ID NO: 1986 - DNA, 20 bp, Unknown
  Description of Unknown: gRNA target site sequence
aatcttgtctgcaagggaac

SEQ ID NO: 1987 - DNA, 20 bp, Unknown
  Description of Unknown: gRNA target site sequence
tgcaagggaacaagcttgat

SEQ ID NO: 1988 - DNA, 20 bp, Unknown
  Description of Unknown: gRNA target site sequence
aacaagcttgataagataat

SEQ ID NO: 1989 - DNA, 20 bp, Unknown
  Description of Unknown: gRNA target site sequence
cttgataagataataagctt

SEQ ID NO: 1990 - DNA, 20 bp, Unknown
  Description of Unknown: gRNA target site sequence
aagctttagttatcctgttt

SEQ ID NO: 1991 - DNA, 20 bp, Unknown
  Description of Unknown: gRNA target site sequence
gctttagttatcctgtttga

SEQ ID NO: 1992 - DNA, 20 bp, Unknown
  Description of Unknown: gRNA target site sequence
catccccactgctgaaccta

SEQ ID NO: 1993 - DNA, 20 bp, Unknown
  Description of Unknown: gRNA target site sequence
ccactgctgaacctacagca

SEQ ID NO: 1994 - DNA, 20 bp, Unknown
  Description of Unknown: gRNA target site sequence
cactgctgaacctacagcaa

SEQ ID NO: 1995 - DNA, 20 bp, Unknown
  Description of Unknown: gRNA target site sequence
acagcaaaggacatctctgt

SEQ ID NO: 1996 - DNA, 20 bp, Unknown
  Description of Unknown: gRNA target site sequence
cagcaaaggacatctctgtc

SEQ ID NO: 1997 - DNA, 20 bp, Unknown
  Description of Unknown: gRNA target site sequence
aaaggacatctctgtcaggt

SEQ ID NO: 1998 - DNA, 20 bp, Unknown
  Description of Unknown: gRNA target site sequence
aaggacatctctgtcaggtt

SEQ ID NO: 1999 - DNA, 20 bp, Unknown
  Description of Unknown: gRNA target site sequence
gacatctctgtcaggttggg

SEQ ID NO: 2000 - DNA, 20 bp, Unknown
  Description of Unknown: gRNA target site sequence
catctctgtcaggttgggta

SEQ ID NO: 2001 - DNA, 20 bp, Unknown
  Description of Unknown: gRNA target site sequence
atctctgtcaggttgggtag

SEQ ID NO: 2002 - DNA, 20 bp, Unknown
  Description of Unknown: gRNA target site sequence
tcaggttgggtagaggatgt

SEQ ID NO: 2003 - DNA, 20 bp, Unknown
  Description of Unknown: gRNA target site sequence
ttgggtagaggatgttggaa

SEQ ID NO: 2004 - DNA, 20 bp, Unknown
  Description of Unknown: gRNA target site sequence
gggtagaggatgttggaata

SEQ ID NO: 2005 - DNA, 20 bp, Unknown
  Description of Unknown: gRNA target site sequence
atatctttgtgtatgtgtat

SEQ ID NO: 2006 - DNA, 20 bp, Unknown
  Description of Unknown: gRNA target site sequence
atctttgtgtatgtgtataa

SEQ ID NO: 2007 - DNA, 20 bp, Unknown
  Description of Unknown: gRNA target site sequence
ttgtgtatgtgtataagaga

SEQ ID NO: 2008 - DNA, 20 bp, Unknown
  Description of Unknown: gRNA target site sequence
gtgtatgtgtataagagaca

SEQ ID NO: 2009 - DNA, 20 bp, Unknown
  Description of Unknown: gRNA target site sequence
gtatgtgtataagagacaga

SEQ ID NO: 2010 - DNA, 20 bp, Unknown
  Description of Unknown: gRNA target site sequence
tatgtgtataagagacagag

SEQ ID NO: 2011 - DNA, 20 bp, Unknown
  Description of Unknown: gRNA target site sequence
atgtgtataagagacagaga

SEQ ID NO: 2012 - DNA, 20 bp, Unknown
  Description of Unknown: gRNA target site sequence
gtgtataagagacagagagg

SEQ ID NO: 2013 - DNA, 20 bp, Unknown
  Description of Unknown: gRNA target site sequence
ataagagacagagagggaga

SEQ ID NO: 2014 - DNA, 20 bp, Unknown
  Description of Unknown: gRNA target site sequence
aagagacagagagggagaaa

SEQ ID NO: 2015 - DNA, 20 bp, Unknown
  Description of Unknown: gRNA target site sequence
gagacagagagggagaaaga

SEQ ID NO: 2016 - DNA, 20 bp, Unknown
  Description of Unknown: gRNA target site sequence
gacagagagggagaaagaga

SEQ ID NO: 2017 - DNA, 20 bp, Unknown
  Description of Unknown: gRNA target site sequence
cagagagggagaaagagaga

SEQ ID NO: 2018 - DNA, 20 bp, Unknown
  Description of Unknown: gRNA target site sequence
gagagggagaaagagagaga

SEQ ID NO: 2019 - DNA, 20 bp, Unknown
  Description of Unknown: gRNA target site sequence
gggagaaagagagagagaga

SEQ ID NO: 2020 - DNA, 20 bp, Unknown
  Description of Unknown: gRNA target site sequence
gagaaagagagagagagaaa

SEQ ID NO: 2021 - DNA, 20 bp, Unknown
  Description of Unknown: gRNA target site sequence
aagagagagagagaaagagc

SEQ ID NO: 2022 - DNA, 20 bp, Unknown
  Description of Unknown: gRNA target site sequence
agagagagagaaagagcgag

SEQ ID NO: 2023 - DNA, 20 bp, Unknown
  Description of Unknown: gRNA target site sequence
gagagagaaagagcgagaag

SEQ ID NO: 2024 - DNA, 20 bp, Unknown
  Description of Unknown: gRNA target site sequence
agagagaaagagcgagaaga

SEQ ID NO: 2025 - DNA, 20 bp, Unknown
  Description of Unknown: gRNA target site sequence
gagaaagagcgagaagaagg

SEQ ID NO: 2026 - DNA, 20 bp, Unknown
  Description of Unknown: gRNA target site sequence
gaaagagcgagaagaaggaa

SEQ ID NO: 2027 - DNA, 20 bp, Unknown
  Description of Unknown: gRNA target site sequence
aaagagcgagaagaaggaag

SEQ ID NO: 2028 - DNA, 20 bp, Unknown
  Description of Unknown: gRNA target site sequence
gagcgagaagaaggaagagg

SEQ ID NO: 2029 - DNA, 20 bp, Unknown
  Description of Unknown: gRNA target site sequence
gcgagaagaaggaagaggaa

SEQ ID NO: 2030 - DNA, 20 bp, Unknown
  Description of Unknown: gRNA target site sequence
agaagaaggaagaggaagag

SEQ ID NO: 2031 - DNA, 20 bp, Unknown
  Description of Unknown: gRNA target site sequence
agaaggaagaggaagagaag

SEQ ID NO: 2032 - DNA, 20 bp, Unknown
  Description of Unknown: gRNA target site sequence
gaaggaagaggaagagaaga

SEQ ID NO: 2033 - DNA, 20 bp, Unknown
  Description of Unknown: gRNA target site sequence
aaggaagaggaagagaagaa

SEQ ID NO: 2034 - DNA, 20 bp, Unknown
  Description of Unknown: gRNA target site sequence
ggaagaggaagagaagaagg

SEQ ID NO: 2035 - DNA, 20 bp, Unknown
  Description of Unknown: gRNA target site sequence
aagaggaagagaagaaggga

SEQ ID NO: 2036 - DNA, 20 bp, Unknown
  Description of Unknown: gRNA target site sequence
gaggaagagaagaagggaga

SEQ ID NO: 2037 - DNA, 20 bp, Unknown
  Description of Unknown: gRNA target site sequence
aggaagagaagaagggagag

SEQ ID NO: 2038 - DNA, 20 bp, Unknown
  Description of Unknown: gRNA target site sequence
ggaagagaagaagggagaga

SEQ ID NO: 2039 - DNA, 20 bp, Unknown
  Description of Unknown: gRNA target site sequence
aagagaagaagggagagagg

SEQ ID NO: 2040 - DNA, 20 bp, Unknown
  Description of Unknown: gRNA target site sequence
agaagaagggagagagggag

SEQ ID NO: 2041 - DNA, 20 bp, Unknown
  Description of Unknown: gRNA target site sequence
gaagaagggagagagggaga

SEQ ID NO: 2042 - DNA, 20 bp, Unknown
  Description of Unknown: gRNA target site sequence
aagaagggagagagggagaa

SEQ ID NO: 2043 - DNA, 20 bp, Unknown
  Description of Unknown: gRNA target site sequence
gaagggagagagggagaagg

SEQ ID NO: 2044 - DNA, 20 bp, Unknown
  Description of Unknown: gRNA target site sequence
agggagagagggagaaggga

SEQ ID NO: 2045 - DNA, 20 bp, Unknown
  Description of Unknown: gRNA target site sequence
ggagaagggagagtttgtaa

SEQ ID NO: 2046 - DNA, 20 bp, Unknown
  Description of Unknown: gRNA target site sequence
agggagagtttgtaatggca

SEQ ID NO: 2047 - DNA, 20 bp, Unknown
  Description of Unknown: gRNA target site sequence
agagtttgtaatggcaaagc

SEQ ID NO: 2048 - DNA, 20 bp, Unknown
  Description of Unknown: gRNA target site sequence
tgtaatggcaaagctggcct

SEQ ID NO: 2049 - DNA, 20 bp, Unknown
  Description of Unknown: gRNA target site sequence
gtaatggcaaagctggcctt

SEQ ID NO: 2050 - DNA, 20 bp, Unknown
  Description of Unknown: gRNA target site sequence
atggcaaagctggccttagg

SEQ ID NO: 2051 - DNA, 20 bp, Unknown
  Description of Unknown: gRNA target site sequence
ggcaaagctggccttaggca

SEQ ID NO: 2052 - DNA, 20 bp, Unknown
  Description of Unknown: gRNA target site sequence
gcaaagctggccttaggcag

SEQ ID NO: 2053 - DNA, 20 bp, Unknown
  Description of Unknown: gRNA target site sequence
ggccttaggcagaggtgtct

SEQ ID NO: 2054 - DNA, 20 bp, Unknown
  Description of Unknown: gRNA target site sequence
ccttaggcagaggtgtctga

SEQ ID NO: 2055 - DNA, 20 bp, Unknown
  Description of Unknown: gRNA target site sequence
cttaggcagaggtgtctgag

SEQ ID NO: 2056 - DNA, 20 bp, Unknown
  Description of Unknown: gRNA target site sequence
ttaggcagaggtgtctgaga

SEQ ID NO: 2057 - DNA, 20 bp, Unknown
  Description of Unknown: gRNA target site sequence
gtctgagagggactgtcaaa

SEQ ID NO: 2058 - DNA, 20 bp, Unknown
  Description of Unknown: gRNA target site sequence
ctgtcaaaaagaaatcctga

SEQ ID NO: 2059 - DNA, 20 bp, Unknown
  Description of Unknown: gRNA target site sequence
tgtcaaaaagaaatcctgac

SEQ ID NO: 2060 - DNA, 20 bp, Unknown
  Description of Unknown: gRNA target site sequence
tcaaaaagaaatcctgacag

SEQ ID NO: 2061 - DNA, 20 bp, Unknown
  Description of Unknown: gRNA target site sequence
caaaaagaaatcctgacagg

SEQ ID NO: 2062 - DNA, 20 bp, Unknown
  Description of Unknown: gRNA target site sequence
cacctgtgataaataaaaac

SEQ ID NO: 2063 - DNA, 20 bp, Unknown
  Description of Unknown: gRNA target site sequence
acctgtgataaataaaaact

SEQ ID NO: 2064 - DNA, 20 bp, Unknown
  Description of Unknown: gRNA target site sequence
aaactgggactttcacttcc

SEQ ID NO: 2065 - DNA, 20 bp, Unknown
  Description of Unknown: gRNA target site sequence
ggactttcacttcctggctg

SEQ ID NO: 2066 - DNA, 20 bp, Unknown
  Description of Unknown: gRNA target site sequence
gactttcacttcctggctga

SEQ ID NO: 2067 - DNA, 20 bp, Unknown
  Description of Unknown: gRNA target site sequence
actttcacttcctggctgaa

SEQ ID NO: 2068 - DNA, 20 bp, Unknown
  Description of Unknown: gRNA target site sequence
ctttcacttcctggctgaag

SEQ ID NO: 2069 - DNA, 20 bp, Unknown
  Description of Unknown: gRNA target site sequence
tcacttcctggctgaagggg

SEQ ID NO: 2070 - DNA, 20 bp, Unknown
  Description of Unknown: gRNA target site sequence
cacttcctggctgaagggga

SEQ ID NO: 2071 - DNA, 20 bp, Unknown
  Description of Unknown: gRNA target site sequence
aaggggaaggcaaaacgtcc

SEQ ID NO: 2072 - DNA, 20 bp, Unknown
  Description of Unknown: gRNA target site sequence
gaaggcaaaacgtcccagtc

SEQ ID NO: 2073 - DNA, 20 bp, Unknown
  Description of Unknown: gRNA target site sequence
aacgtcccagtcaagcaaac

SEQ ID NO: 2074 - DNA, 20 bp, Unknown
  Description of Unknown: gRNA target site sequence
cagtcaagcaaactggataa

SEQ ID NO: 2075 - DNA, 20 bp, Unknown
  Description of Unknown: gRNA target site sequence
agtcaagcaaactggataac

SEQ ID NO: 2076 - DNA, 20 bp, Unknown
  Description of Unknown: gRNA target site sequence
gtcaagcaaactggataaca

SEQ ID NO: 2077 - DNA, 20 bp, Unknown
  Description of Unknown: gRNA target site sequence
agcaaactggataacaggga

SEQ ID NO: 2078 - DNA, 20 bp, Unknown
  Description of Unknown: gRNA target site sequence
gcaaactggataacagggat

SEQ ID NO: 2079 - DNA, 20 bp, Unknown
  Description of Unknown: gRNA target site sequence
aacagggataggtgtcatgt

SEQ ID NO: 2080 - DNA, 20 bp, Unknown
  Description of Unknown: gRNA target site sequence
agggataggtgtcatgtgag

SEQ ID NO: 2081 - DNA, 20 bp, Unknown
  Description of Unknown: gRNA target site sequence
aggtgtcatgtgagcagcta

SEQ ID NO: 2082 - DNA, 20 bp, Unknown
  Description of Unknown: gRNA target site sequence
tgagcagctacagcttcgac

SEQ ID NO: 2083 - DNA, 20 bp, Unknown
  Description of Unknown: gRNA target site sequence
gagcagctacagcttcgaca

SEQ ID NO: 2084 - DNA, 20 bp, Unknown
  Description of Unknown: gRNA target site sequence
cagctacagcttcgacaagg

SEQ ID NO: 2085 - DNA, 20 bp, Unknown
  Description of Unknown: gRNA target site sequence
agctacagcttcgacaagga

SEQ ID NO: 2086 - DNA, 20 bp, Unknown
  Description of Unknown: gRNA target site sequence
agcttcgacaaggaaggcac

SEQ ID NO: 2087 - DNA, 20 bp, Unknown
  Description of Unknown: gRNA target site sequence
cttcgacaaggaaggcacca

SEQ ID NO: 2088 - DNA, 20 bp, Unknown
  Description of Unknown: gRNA target site sequence
cgacaaggaaggcaccagag

SEQ ID NO: 2089 - DNA, 20 bp, Unknown
  Description of Unknown: gRNA target site sequence
gaaggcaccagagtggcacc

SEQ ID NO: 2090 - DNA, 20 bp, Unknown
  Description of Unknown: gRNA target site sequence
aggcaccagagtggcaccca

SEQ ID NO: 2091 - DNA, 20 bp, Unknown
  Description of Unknown: gRNA target site sequence
ggcaccagagtggcacccag

SEQ ID NO: 2092 - DNA, 20 bp, Unknown
  Description of Unknown: gRNA target site sequence
tggcacccagaggtgacttc

SEQ ID NO: 2093 - DNA, 20 bp, Unknown
  Description of Unknown: gRNA target site sequence
ggcacccagaggtgacttcc

SEQ ID NO: 2094 - DNA, 20 bp, Unknown
  Description of Unknown: gRNA target site sequence
cagaggtgacttccaggtga

SEQ ID NO: 2095 - DNA, 20 bp, Unknown
  Description of Unknown: gRNA target site sequence
gaggtgacttccaggtgatg

SEQ ID NO: 2096 - DNA, 20 bp, Unknown
  Description of Unknown: gRNA target site sequence
ggtgacttccaggtgatgga

SEQ ID NO: 2097 - DNA, 20 bp, Unknown
  Description of Unknown: gRNA target site sequence
gtgacttccaggtgatggag

SEQ ID NO: 2098 - DNA, 20 bp, Unknown
  Description of Unknown: gRNA target site sequence
tgacttccaggtgatggaga

SEQ ID NO: 2099 - DNA, 20 bp, Unknown
  Description of Unknown: gRNA target site sequence
ccaggtgatggagagggaca

SEQ ID NO: 2100 - DNA, 20 bp, Unknown
  Description of Unknown: gRNA target site sequence
aggtgatggagagggacatg

SEQ ID NO: 2101 - DNA, 20 bp, Unknown
  Description of Unknown: gRNA target site sequence
tgatggagagggacatggag

SEQ ID NO: 2102 - DNA, 20 bp, Unknown
  Description of Unknown: gRNA target site sequence
gatggagagggacatggaga

SEQ ID NO: 2103 - DNA, 20 bp, Unknown
  Description of Unknown: gRNA target site sequence
tggagagggacatggagaag

SEQ ID NO: 2104 - DNA, 20 bp, Unknown
  Description of Unknown: gRNA target site sequence
ggacatggagaaggagaata

SEQ ID NO: 2105 - DNA, 20 bp, Unknown
  Description of Unknown: gRNA target site sequence
aaggagaataaagaccatcc

SEQ ID NO: 2106 - DNA, 20 bp, Unknown
  Description of Unknown: gRNA target site sequence
gagaataaagaccatccaag

SEQ ID NO: 2107 - DNA, 20 bp, Unknown
  Description of Unknown: gRNA target site sequence
accatccaagtggtcctctc

SEQ ID NO: 2108 - DNA, 20 bp, Unknown
  Description of Unknown: gRNA target site sequence
atccaagtggtcctctctag

SEQ ID NO: 2109 - DNA, 20 bp, Unknown
  Description of Unknown: gRNA target site sequence
ctctctagcagcattctgcc

SEQ ID NO: 2110 - DNA, 20 bp, Unknown
  Description of Unknown: gRNA target site sequence
cccagcctaatctcatgttt

SEQ ID NO: 2111 - DNA, 20 bp, Unknown
  Description of Unknown: gRNA target site sequence
ccagcctaatctcatgtttc

SEQ ID NO: 2112 - DNA, 20 bp, Unknown
  Description of Unknown: gRNA target site sequence
cagcctaatctcatgtttca

SEQ ID NO: 2113 - DNA, 20 bp, Unknown
  Description of Unknown: gRNA target site sequence
atctcatgtttcagggctgt

SEQ ID NO: 2114 - DNA, 20 bp, Unknown
  Description of Unknown: gRNA target site sequence
tgtttcagggctgttagctt

SEQ ID NO: 2115 - DNA, 20 bp, Unknown
  Description of Unknown: gRNA target site sequence
cagggctgttagcttaagta

SEQ ID NO: 2116 - DNA, 20 bp, Unknown
  Description of Unknown: gRNA target site sequence
gcttaagtacagttgtcatg

SEQ ID NO: 2117 - DNA, 20 bp, Unknown
  Description of Unknown: gRNA target site sequence
gtacagttgtcatgaagaca

SEQ ID NO: 2118 - DNA, 20 bp, Unknown
  Description of Unknown: gRNA target site sequence
acagttgtcatgaagacaaa

SEQ ID NO: 2119 - DNA, 20 bp, Unknown
  Description of Unknown: gRNA target site sequence
catgaagacaaagagcaaaa

SEQ ID NO: 2120 - DNA, 20 bp, Unknown
  Description of Unknown: gRNA target site sequence
gctgccccatgttattgcaa

SEQ ID NO: 2121 - DNA, 20 bp, Unknown
  Description of Unknown: gRNA target site sequence
actcaaattgaaaccctgct

SEQ ID NO: 2122 - DNA, 20 bp, Unknown
  Description of Unknown: gRNA target site sequence
caaattgaaaccctgctcag

SEQ ID NO: 2123 - DNA, 20 bp, Unknown
  Description of Unknown: gRNA target site sequence
aacaaattcatctaaaatat

SEQ ID NO: 2124 - DNA, 20 bp, Unknown
  Description of Unknown: gRNA target site sequence
acctcaaatgccaatgccta

SEQ ID NO: 2125 - DNA, 20 bp, Unknown
  Description of Unknown: gRNA target site sequence
aatgccaatgcctacggttc

SEQ ID NO: 2126 - DNA, 20 bp, Unknown
  Description of Unknown: gRNA target site sequence
ttattgcctcatctcatctc

SEQ ID NO: 2127 - DNA, 20 bp, Unknown
  Description of Unknown: gRNA target site sequence
ctaaactcaacatcatcttt

SEQ ID NO: 2128 - DNA, 20 bp, Unknown
  Description of Unknown: gRNA target site sequence
actcaacatcatcttttggc

SEQ ID NO: 2129 - DNA, 20 bp, Unknown
  Description of Unknown: gRNA target site sequence
ttggccagttgataccacta

SEQ ID NO: 2130 - DNA, 20 bp, Unknown
  Description of Unknown: gRNA target site sequence
tggccagttgataccactaa

SEQ ID NO: 2131 - DNA, 20 bp, Unknown
  Description of Unknown: gRNA target site sequence
accactaaaggtatccccat

SEQ ID NO: 2132 - DNA, 20 bp, Unknown
  Description of Unknown: gRNA target site sequence
aaaggtatccccatcagaca

SEQ ID NO: 2133 - DNA, 20 bp, Unknown
  Description of Unknown: gRNA target site sequence
catcagacatggtgcaccat

SEQ ID NO: 2134 - DNA, 20 bp, Unknown
  Description of Unknown: gRNA target site sequence
cacactcaccattttgctca

SEQ ID NO: 2135 - DNA, 20 bp, Unknown
  Description of Unknown: gRNA target site sequence
caccattttgctcaaagaaa

SEQ ID NO: 2136 - DNA, 20 bp, Unknown
  Description of Unknown: gRNA target site sequence
ttgctcaaagaaacagctgt

SEQ ID NO: 2137 - DNA, 20 bp, Unknown
  Description of Unknown: gRNA target site sequence
tgctcaaagaaacagctgtg

SEQ ID NO: 2138 - DNA, 20 bp, Unknown
  Description of Unknown: gRNA target site sequence
ctcaaagaaacagctgtgag

SEQ ID NO: 2139 - DNA, 20 bp, Unknown
  Description of Unknown: gRNA target site sequence
aagaaacagctgtgaggaga

SEQ ID NO: 2140 - DNA, 20 bp, Unknown
  Description of Unknown: gRNA target site sequence
aaccccgaactaactgctgc

SEQ ID NO: 2141 - DNA, 20 bp, Unknown
  Description of Unknown: gRNA target site sequence
accccgaactaactgctgca

SEQ ID NO: 2142 - DNA, 20 bp, Unknown
  Description of Unknown: gRNA target site sequence
aactaactgctgcaaggatc

SEQ ID NO: 2143 - DNA, 20 bp, Unknown
  Description of Unknown: gRNA target site sequence
ctaactgctgcaaggatcca

SEQ ID NO: 2144 - DNA, 20 bp, Unknown
  Description of Unknown: gRNA target site sequence
taactgctgcaaggatccag

SEQ ID NO: 2145 - DNA, 20 bp, Unknown
  Description of Unknown: gRNA target site sequence
actgctgcaaggatccagag

SEQ ID NO: 2146 - DNA, 20 bp, Unknown
  Description of Unknown: gRNA target site sequence
ctgctgcaaggatccagagg

SEQ ID NO: 2147 - DNA, 20 bp, Unknown
  Description of Unknown: gRNA target site sequence
ctgcaaggatccagaggagg

SEQ ID NO: 2148 - DNA, 20 bp, Unknown
  Description of Unknown: gRNA target site sequence
aaggatccagaggaggaagt

SEQ ID NO: 2149 - DNA, 20 bp, Unknown
  Description of Unknown: gRNA target site sequence
cagaggaggaagtcagaatc

SEQ ID NO: 2150 - DNA, 20 bp, Unknown
  Description of Unknown: gRNA target site sequence
agaggaggaagtcagaatct

SEQ ID NO: 2151 - DNA, 20 bp, Unknown
  Description of Unknown: gRNA target site sequence
aggaagtcagaatctgggca

SEQ ID NO: 2152 - DNA, 20 bp, Unknown
  Description of Unknown: gRNA target site sequence
tcagaatctgggcacggttc

SEQ ID NO: 2153 - DNA, 20 bp, Unknown
  Description of Unknown: gRNA target site sequence
gcacggttctggatctgcaa

SEQ ID NO: 2154 - DNA, 20 bp, Unknown
  Description of Unknown: gRNA target site sequence
tggatctgcaacagaaaaca

SEQ ID NO: 2155 - DNA, 20 bp, Unknown
  Description of Unknown: gRNA target site sequence
atctgcaacagaaaacaaag

SEQ ID NO: 2156 - DNA, 20 bp, Unknown
  Description of Unknown: gRNA target site sequence
ctgcaacagaaaacaaagca

SEQ ID NO: 2157 - DNA, 20 bp, Unknown
  Description of Unknown: gRNA target site sequence
aaacaaagcagagcctccct

SEQ ID NO: 2158 - DNA, 20 bp, Unknown
  Description of Unknown: gRNA target site sequence
aaagcagagcctccctgaga

SEQ ID NO: 2159 - DNA, 20 bp, Unknown
  Description of Unknown: gRNA target site sequence
cctgagacagttttaaactc

SEQ ID NO: 2160 - DNA, 20 bp, Unknown
  Description of Unknown: gRNA target site sequence
ctgagacagttttaaactct

SEQ ID NO: 2161 - DNA, 20 bp, Unknown
  Description of Unknown: gRNA target site sequence
tgagacagttttaaactcta

SEQ ID NO: 2162 - DNA, 20 bp, Unknown
  Description of Unknown: gRNA target site sequence
agggctctactccccaacat

SEQ ID NO: 2163 - DNA, 20 bp, Unknown
  Description of Unknown: gRNA target site sequence
ctccccaacattggtgaaaa

SEQ ID NO: 2164 - DNA, 20 bp, Unknown
  Description of Unknown: gRNA target site sequence
tccccaacattggtgaaaaa

SEQ ID NO: 2165 - DNA, 20 bp, Unknown
  Description of Unknown: gRNA target site sequence
cattggtgaaaaaaggacat

SEQ ID NO: 2166 - DNA, 20 bp, Unknown
  Description of Unknown: gRNA target site sequence
ttggtgaaaaaaggacatta

SEQ ID NO: 2167 - DNA, 20 bp, Unknown
  Description of Unknown: gRNA target site sequence
aaaaaggacattagagcttc

SEQ ID NO: 2168 - DNA, 20 bp, Unknown
  Description of Unknown: gRNA target site sequence
aaaaggacattagagcttcc

SEQ ID NO: 2169 - DNA, 20 bp, Unknown
  Description of Unknown: gRNA target site sequence
cattagagcttccaggcctt

SEQ ID NO: 2170 - DNA, 20 bp, Unknown
  Description of Unknown: gRNA target site sequence
attagagcttccaggccttg

SEQ ID NO: 2171 - DNA, 20 bp, Unknown
  Description of Unknown: gRNA target site sequence
aggtccacccctaaattgca

SEQ ID NO: 2172 - DNA, 20 bp, Unknown
  Description of Unknown: gRNA target site sequence
ggtccacccctaaattgcat

SEQ ID NO: 2173 - DNA, 20 bp, Unknown
  Description of Unknown: gRNA target site sequence
ccacccctaaattgcatggg

SEQ ID NO: 2174 - DNA, 20 bp, Unknown
  Description of Unknown: gRNA target site sequence
ttgcatgggtagcccaccaa

SEQ ID NO: 2175 - DNA, 20 bp, Unknown
  Description of Unknown: gRNA target site sequence
tgcatgggtagcccaccaat

SEQ ID NO: 2176 - DNA, 20 bp, Unknown
  Description of Unknown: gRNA target site sequence
gggtagcccaccaataggtt

SEQ ID NO: 2177 - DNA, 20 bp, Unknown
  Description of Unknown: gRNA target site sequence
caccaataggtttggctatt

SEQ ID NO: 2178 - DNA, 20 bp, Unknown
  Description of Unknown: gRNA target site sequence
accaataggtttggctattt

SEQ ID NO: 2179 - DNA, 20 bp, Unknown
  Description of Unknown: gRNA target site sequence
gctatttgggactacttccc

SEQ ID NO: 2180 - DNA, 20 bp, Unknown
  Description of Unknown: gRNA target site sequence
ctatttgggactacttcccc

SEQ ID NO: 2181 - DNA, 20 bp, Unknown
  Description of Unknown: gRNA target site sequence
atttgggactacttccccag

SEQ ID NO: 2182 - DNA, 20 bp, Unknown
  Description of Unknown: gRNA target site sequence
ggagcatcatatcatatcaa

SEQ ID NO: 2183 - DNA, 20 bp, Unknown
  Description of Unknown: gRNA target site sequence
atcatatcatatcaaaagta

SEQ ID NO: 2184 - DNA, 20 bp, Unknown
  Description of Unknown: gRNA target site sequence
gtacagatcaaacgtcatga

SEQ ID NO: 2185 - DNA, 20 bp, Unknown
  Description of Unknown: gRNA target site sequence
agatcaaacgtcatgatggt

SEQ ID NO: 2186 - DNA, 20 bp, Unknown
  Description of Unknown: gRNA target site sequence
cgtcatgatggttagcactc

SEQ ID NO: 2187 - DNA, 20 bp, Unknown
  Description of Unknown: gRNA target site sequence
tcatgatggttagcactcca

SEQ ID NO: 2188 - DNA, 20 bp, Unknown
  Description of Unknown: gRNA target site sequence
gatggttagcactccagagc

SEQ ID NO: 2189 - DNA, 20 bp, Unknown
  Description of Unknown: gRNA target site sequence
tggttagcactccagagcga

SEQ ID NO: 2190 - DNA, 20 bp, Unknown
  Description of Unknown: gRNA target site sequence
ccccaaatcattttatttta

SEQ ID NO: 2191 - DNA, 20 bp, Unknown
  Description of Unknown: gRNA target site sequence
aaatcattttattttacagt

SEQ ID NO: 2192 - DNA, 20 bp, Unknown
  Description of Unknown: gRNA target site sequence
tttacagtcagaatgctatt

SEQ ID NO: 2193 - DNA, 20 bp, Unknown
  Description of Unknown: gRNA target site sequence
ttacagtcagaatgctatta

SEQ ID NO: 2194 - DNA, 20 bp, Unknown
  Description of Unknown: gRNA target site sequence
ttaaggttgccacccacaat

SEQ ID NO: 2195 - DNA, 20 bp, Unknown
  Description of Unknown: gRNA target site sequence
ggttgccacccacaataagc

SEQ ID NO: 2196 - DNA, 20 bp, Unknown
  Description of Unknown: gRNA target site sequence
gttgccacccacaataagca

SEQ ID NO: 2197 - DNA, 20 bp, Unknown
  Description of Unknown: gRNA target site sequence
caataagcaaggctaccatg

SEQ ID NO: 2198 - DNA, 20 bp, Unknown
  Description of Unknown: gRNA target site sequence
agcaaggctaccatgtggta

SEQ ID NO: 2199 - DNA, 20 bp, Unknown
  Description of Unknown: gRNA target site sequence
catgtggtacagaactctta

SEQ ID NO: 2200 - DNA, 20 bp, Unknown
  Description of Unknown: gRNA target site sequence
tgtggtacagaactcttaaa

SEQ ID NO: 2201 - DNA, 20 bp, Unknown
  Description of Unknown: gRNA target site sequence
actcttaaagagaatgtcca

SEQ ID NO: 2202 - DNA, 20 bp, Unknown
  Description of Unknown: gRNA target site sequence
gagaatgtccacagtcctaa

SEQ ID NO: 2203 - DNA, 20 bp, Unknown
  Description of Unknown: gRNA target site sequence
aaagtaaacctcctgaaatt

SEQ ID NO: 2204 - DNA, 20 bp, Unknown
  Description of Unknown: gRNA target site sequence
aagtaaacctcctgaaatta

SEQ ID NO: 2205 - DNA, 20 bp, Unknown
  Description of Unknown: gRNA target site sequence
aacaaaactgtttttgtgca

SEQ ID NO: 2206 - DNA, 20 bp, Unknown
  Description of Unknown: gRNA target site sequence
aaaactgtttttgtgcatag

SEQ ID NO: 2207 - DNA, 20 bp, Unknown
  Description of Unknown: gRNA target site sequence
catagaagactgcaatgcaa

SEQ ID NO: 2208 - DNA, 20 bp, Unknown
  Description of Unknown: gRNA target site sequence
atagaagactgcaatgcaac

SEQ ID NO: 2209 - DNA, 20 bp, Unknown
  Description of Unknown: gRNA target site sequence
caatgcaacaggtgtcaact

SEQ ID NO: 2210 - DNA, 20 bp, Unknown
  Description of Unknown: gRNA target site sequence
caggtgtcaactcagtgaaa

SEQ ID NO: 2211 - DNA, 20 bp, Unknown
  Description of Unknown: gRNA target site sequence
gctcaccaattacataaatc

SEQ ID NO: 2212 - DNA, 20 bp, Unknown
  Description of Unknown: gRNA target site sequence
ctcaccaattacataaatct

SEQ ID NO: 2213 - DNA, 20 bp, Unknown
  Description of Unknown: gRNA target site sequence
tgggttccgttgcctatgcc

SEQ ID NO: 2214 - DNA, 20 bp, Unknown
  Description of Unknown: gRNA target site sequence
gggttccgttgcctatgccc

SEQ ID NO: 2215 - DNA, 20 bp, Unknown
  Description of Unknown: gRNA target site sequence
ttccgttgcctatgcccagg

SEQ ID NO: 2216 - DNA, 20 bp, Unknown
  Description of Unknown: gRNA target site sequence
ttgcctatgcccaggtagta

SEQ ID NO: 2217 - DNA, 20 bp, Unknown
  Description of Unknown: gRNA target site sequence
cctatgcccaggtagtatgg

SEQ ID NO: 2218 - DNA, 20 bp, Unknown
  Description of Unknown: gRNA target site sequence
atgcccaggtagtatggcgg

SEQ ID NO: 2219 - DNA, 20 bp, Unknown
  Description of Unknown: gRNA target site sequence
tgcccaggtagtatggcggt

SEQ ID NO: 2220 - DNA, 20 bp, Unknown
  Description of Unknown: gRNA target site sequence
tagtatggcggtgggtacat

SEQ ID NO: 2221 - DNA, 20 bp, Unknown
  Description of Unknown: gRNA target site sequence
ggtacatgagctccaccttg

SEQ ID NO: 2222 - DNA, 20 bp, Unknown
  Description of Unknown: gRNA target site sequence
tgagctccaccttgcagatg

SEQ ID NO: 2223 - DNA, 20 bp, Unknown
  Description of Unknown: gRNA target site sequence
agctccaccttgcagatgta

SEQ ID NO: 2224 - DNA, 20 bp, Unknown
  Description of Unknown: gRNA target site sequence
gatgtagagtcccgtgtcca

SEQ ID NO: 2225 - DNA, 20 bp, Unknown
  Description of Unknown: gRNA target site sequence
agtcccgtgtccatggccct

SEQ ID NO: 2226 - DNA, 20 bp, Unknown
  Description of Unknown: gRNA target site sequence
tgtccatggccctcagtcct

SEQ ID NO: 2227 - DNA, 20 bp, Unknown
  Description of Unknown: gRNA target site sequence
catggccctcagtccttgga

SEQ ID NO: 2228 - DNA, 20 bp, Unknown
  Description of Unknown: gRNA target site sequence
gccctcagtccttggatagt

SEQ ID NO: 2229 - DNA, 20 bp, Unknown
  Description of Unknown: gRNA target site sequence
ccctcagtccttggatagtg

SEQ ID NO: 2230 - DNA, 20 bp, Unknown
  Description of Unknown: gRNA target site sequence
gaggttcacttgatttccac

SEQ ID NO: 2231 - DNA, 20 bp, Unknown
  Description of Unknown: gRNA target site sequence
ggttcacttgatttccactg

SEQ ID NO: 2232 - DNA, 20 bp, Unknown
  Description of Unknown: gRNA target site sequence
gttcacttgatttccactgg

SEQ ID NO: 2233 - DNA, 20 bp, Unknown
  Description of Unknown: gRNA target site sequence
ttccactggaggtgcccgtg

SEQ ID NO: 2234 - DNA, 20 bp, Unknown
  Description of Unknown: gRNA target site sequence
actggaggtgcccgtgcaga

SEQ ID NO: 2235 - DNA, 20 bp, Unknown
  Description of Unknown: gRNA target site sequence
cccgtgcagatggaatcatc

SEQ ID NO: 2236 - DNA, 20 bp, Unknown
  Description of Unknown: gRNA target site sequence
ccgtgcagatggaatcatct

SEQ ID NO: 2237 - DNA, 20 bp, Unknown
  Description of Unknown: gRNA target site sequence
tgcagatggaatcatctagg

SEQ ID NO: 2238 - DNA, 20 bp, Unknown
  Description of Unknown: gRNA target site sequence
gcagatggaatcatctagga

SEQ ID NO: 2239 - DNA, 20 bp, Unknown
  Description of Unknown: gRNA target site sequence
tcaactcattccccatcatg

SEQ ID NO: 2240 - DNA, 20 bp, Unknown
  Description of Unknown: gRNA target site sequence
caactcattccccatcatgt

SEQ ID NO: 2241 - DNA, 20 bp, Unknown
  Description of Unknown: gRNA target site sequence
ccatcatgtaggttgccgca

SEQ ID NO: 2242 - DNA, 20 bp, Unknown
  Description of Unknown: gRNA target site sequence
gtaggttgccgcacagactt

SEQ ID NO: 2243 - DNA, 20 bp, Unknown
  Description of Unknown: gRNA target site sequence
ccgcacagacttcagtcacc

SEQ ID NO: 2244 - DNA, 20 bp, Unknown
  Description of Unknown: gRNA target site sequence
gacttcagtcacctggctgt

SEQ ID NO: 2245 - DNA, 20 bp, Unknown
  Description of Unknown: gRNA target site sequence
acctggctgtcagcctgccg

SEQ ID NO: 2246 - DNA, 20 bp, Unknown
  Description of Unknown: gRNA target site sequence
cctgccgaagcactgtcacc

SEQ ID NO: 2247 - DNA, 20 bp, Unknown
  Description of Unknown: gRNA target site sequence
aagcactgtcacccggacct

SEQ ID NO: 2248 - DNA, 20 bp, Unknown
  Description of Unknown: gRNA target site sequence
cactgtcacccggacctcag

SEQ ID NO: 2249 - DNA, 20 bp, Unknown
  Description of Unknown: gRNA target site sequence
cggacctcagtggctttgcc

SEQ ID NO: 2250 - DNA, 20 bp, Unknown
  Description of Unknown: gRNA target site sequence
gacctcagtggctttgcctg

SEQ ID NO: 2251 - DNA, 20 bp, Unknown
  Description of Unknown: gRNA target site sequence
gagatgcatactcacacaca

SEQ ID NO: 2252 - DNA, 20 bp, Unknown
  Description of Unknown: gRNA target site sequence
tgcatactcacacacaaagc

SEQ ID NO: 2253 - DNA, 20 bp, Unknown
  Description of Unknown: gRNA target site sequence
acacaaagctggcgatgcct

SEQ ID NO: 2254 - DNA, 20 bp, Unknown
  Description of Unknown: gRNA target site sequence
gctggcgatgcctcggctgc

SEQ ID NO: 2255 - DNA, 20 bp, Unknown
  Description of Unknown: gRNA target site sequence
gcgatgcctcggctgctggc

SEQ ID NO: 2256 - DNA, 20 bp, Unknown
  Description of Unknown: gRNA target site sequence
tcggctgctggccagtacca

SEQ ID NO: 2257 - DNA, 20 bp, Unknown
  Description of Unknown: gRNA target site sequence
gctgctggccagtaccacag

SEQ ID NO: 2258 - DNA, 20 bp, Unknown
  Description of Unknown: gRNA target site sequence
ctgctggccagtaccacagc

SEQ ID NO: 2259 - DNA, 20 bp, Unknown
  Description of Unknown: gRNA target site sequence
tggccagtaccacagcaggc

SEQ ID NO: 2260 - DNA, 20 bp, Unknown
  Description of Unknown: gRNA target site sequence
ggccagtaccacagcaggct

SEQ ID NO: 2261 - DNA, 20 bp, Unknown
  Description of Unknown: gRNA target site sequence
ggctgggccacgtgcattgc

SEQ ID NO: 2262 - DNA, 20 bp, Unknown
  Description of Unknown: gRNA target site sequence
ggccacgtgcattgctagca

SEQ ID NO: 2263 - DNA, 20 bp, Unknown
  Description of Unknown: gRNA target site sequence
cgtgcattgctagcatggaa

SEQ ID NO: 2264 - DNA, 20 bp, Unknown
  Description of Unknown: gRNA target site sequence
ttgctagcatggaaaagcca

SEQ ID NO: 2265 - DNA, 20 bp, Unknown
  Description of Unknown: gRNA target site sequence
tgctagcatggaaaagccaa

SEQ ID NO: 2266 - DNA, 20 bp, Unknown
  Description of Unknown: gRNA target site sequence
gctagcatggaaaagccaaa

SEQ ID NO: 2267 - DNA, 20 bp, Unknown
  Description of Unknown: gRNA target site sequence
tggaaaagccaaagggaact

SEQ ID NO: 2268 - DNA, 20 bp, Unknown
  Description of Unknown: gRNA target site sequence
agtgaactcatgctccttca

SEQ ID NO: 2269 - DNA, 20 bp, Unknown
  Description of Unknown: gRNA target site sequence
actcatgctccttcatggcc

SEQ ID NO: 2270 - DNA, 20 bp, Unknown
  Description of Unknown: gRNA target site sequence
tgctccttcatggccaagcc

SEQ ID NO: 2271 - DNA, 20 bp, Unknown
  Description of Unknown: gRNA target site sequence
gctccttcatggccaagccc

SEQ ID NO: 2272 - DNA, 20 bp, Unknown
  Description of Unknown: gRNA target site sequence
cttcatggccaagcccaggc

SEQ ID NO: 2273 - DNA, 20 bp, Unknown
  Description of Unknown: gRNA target site sequence
aggcaagcccttctgccttc

SEQ ID NO: 2274 - DNA, 20 bp, Unknown
  Description of Unknown: gRNA target site sequence
gccttctagcttcatcccca

SEQ ID NO: 2275 - DNA, 20 bp, Unknown
  Description of Unknown: gRNA target site sequence
ccttcccctctccacacccc

SEQ ID NO: 2276 - DNA, 20 bp, Unknown
  Description of Unknown: gRNA target site sequence
tccatctctcaactgttttc

SEQ ID NO: 2277 - DNA, 20 bp, Unknown
  Description of Unknown: gRNA target site sequence
ttttccagctactctccata

SEQ ID NO: 2278 - DNA, 20 bp, Unknown
  Description of Unknown: gRNA target site sequence
cataaagatattttcttact

SEQ ID NO: 2279 - DNA, 20 bp, Unknown
  Description of Unknown: gRNA target site sequence
gatattttcttactgagaaa

SEQ ID NO: 2280 - DNA, 20 bp, Unknown
  Description of Unknown: gRNA target site sequence
tactgagaaatagattcttc

SEQ ID NO: 2281 - DNA, 20 bp, Unknown
  Description of Unknown: gRNA target site sequence
gagaaatagattcttcaaga

SEQ ID NO: 2282 - DNA, 20 bp, Unknown
  Description of Unknown: gRNA target site sequence
tagattcttcaagatggttg

SEQ ID NO: 2283 - DNA, 20 bp, Unknown
  Description of Unknown: gRNA target site sequence
attcttcaagatggttgtgg

SEQ ID NO: 2284 - DNA, 20 bp, Unknown
  Description of Unknown: gRNA target site sequence
ttcttcaagatggttgtggc

SEQ ID NO: 2285 - DNA, 20 bp, Unknown
  Description of Unknown: gRNA target site sequence
ttcaagatggttgtggcagg

SEQ ID NO: 2286 - DNA, 20 bp, Unknown
  Description of Unknown: gRNA target site sequence
aagaacactgatatgacaaa

SEQ ID NO: 2287 - DNA, 20 bp, Unknown
  Description of Unknown: gRNA target site sequence
aacactgatatgacaaacag

SEQ ID NO: 2288 - DNA, 20 bp, Unknown
  Description of Unknown: gRNA target site sequence
gatatgacaaacagaagacc

SEQ ID NO: 2289 - DNA, 20 bp, Unknown
  Description of Unknown: gRNA target site sequence
ctaccatgaaatatgtgatt

SEQ ID NO: 2290 - DNA, 20 bp, Unknown
  Description of Unknown: gRNA target site sequence
taccatgaaatatgtgattt

SEQ ID NO: 2291 - DNA, 20 bp, Unknown
  Description of Unknown: gRNA target site sequence
accatgaaatatgtgatttg

SEQ ID NO: 2292 - DNA, 20 bp, Unknown
  Description of Unknown: gRNA target site sequence
tgaaatatgtgatttggggc

SEQ ID NO: 2293 - DNA, 20 bp, Unknown
  Description of Unknown: gRNA target site sequence
tccttcatttttttcacata

SEQ ID NO: 2294 - DNA, 20 bp, Unknown
  Description of Unknown: gRNA target site sequence
tcatttttttcacatatagt

SEQ ID NO: 2295 - DNA, 20 bp, Unknown
  Description of Unknown: gRNA target site sequence
atttttttcacatatagtaa

SEQ ID NO: 2296 - DNA, 20 bp, Unknown
  Description of Unknown: gRNA target site sequence
cacatatagtaagagataat

SEQ ID NO: 2297 - DNA, 20 bp, Unknown
  Description of Unknown: gRNA target site sequence
atagtaagagataattagat

SEQ ID NO: 2298 - DNA, 20 bp, Unknown
  Description of Unknown: gRNA target site sequence
agatgagatgatatgttctc

SEQ ID NO: 2299 - DNA, 20 bp, Unknown
  Description of Unknown: gRNA target site sequence
gatatgttctctggtattct

SEQ ID NO: 2300 - DNA, 20 bp, Unknown
  Description of Unknown: gRNA target site sequence
atatgttctctggtattcta

SEQ ID NO: 2301 - DNA, 20 bp, Unknown
  Description of Unknown: gRNA target site sequence
ctggtattctaaggttatga

SEQ ID NO: 2302 - DNA, 20 bp, Unknown
  Description of Unknown: gRNA target site sequence
ctaaggttatgatagaatga

SEQ ID NO: 2303 - DNA, 20 bp, Unknown
  Description of Unknown: gRNA target site sequence
taaggttatgatagaatgat

SEQ ID NO: 2304 - DNA, 20 bp, Unknown
  Description of Unknown: gRNA target site sequence
aggttatgatagaatgatag

SEQ ID NO: 2305 - DNA, 20 bp, Unknown
  Description of Unknown: gRNA target site sequence
atagaatgataggagctata

SEQ ID NO: 2306 - DNA, 20 bp, Unknown
  Description of Unknown: gRNA target site sequence
tgataggagctatatagctc

SEQ ID NO: 2307 - DNA, 20 bp, Unknown
  Description of Unknown: gRNA target site sequence
tatagctccggaactataat

SEQ ID NO: 2308 - DNA, 20 bp, Unknown
  Description of Unknown: gRNA target site sequence
agctccggaactataatgag

SEQ ID NO: 2309 - DNA, 20 bp, Unknown
  Description of Unknown: gRNA target site sequence
tccggaactataatgagtgg

SEQ ID NO: 2310 - DNA, 20 bp, Unknown
  Description of Unknown: gRNA target site sequence
ccggaactataatgagtggt

SEQ ID NO: 2311 - DNA, 20 bp, Unknown
  Description of Unknown: gRNA target site sequence
cggaactataatgagtggta

SEQ ID NO: 2312 - DNA, 20 bp, Unknown
  Description of Unknown: gRNA target site sequence
ggaactataatgagtggtag

SEQ ID NO: 2313 - DNA, 20 bp, Unknown
  Description of Unknown: gRNA target site sequence
gagtggtaggggaaattctg

SEQ ID NO: 2314 - DNA, 20 bp, Unknown
  Description of Unknown: gRNA target site sequence
agtggtaggggaaattctga

SEQ ID NO: 2315 - DNA, 20 bp, Unknown
  Description of Unknown: gRNA target site sequence
taggggaaattctgaaggtt

SEQ ID NO: 2316 - DNA, 20 bp, Unknown
  Description of Unknown: gRNA target site sequence
aggggaaattctgaaggttg

SEQ ID NO: 2317 - DNA, 20 bp, Unknown
  Description of Unknown: gRNA target site sequence
aaattctgaaggttgaggta

SEQ ID NO: 2318 - DNA, 20 bp, Unknown
  Description of Unknown: gRNA target site sequence
gaatcttgctttatctctca

SEQ ID NO: 2319 - DNA, 20 bp, Unknown
  Description of Unknown: gRNA target site sequence
gtcaaaaacttctgcctact

SEQ ID NO: 2320 - DNA, 20 bp, Unknown
  Description of Unknown: gRNA target site sequence
aaaacttctgcctacttagt

SEQ ID NO: 2321 - DNA, 20 bp, Unknown
  Description of Unknown: gRNA target site sequence
cttctgcctacttagtgagc

SEQ ID NO: 2322 - DNA, 20 bp, Unknown
  Description of Unknown: gRNA target site sequence
ggccctgaacctctgtcacc

SEQ ID NO: 2323 - DNA, 20 bp, Unknown
  Description of Unknown: gRNA target site sequence
gccctgaacctctgtcaccc

SEQ ID NO: 2324 - DNA, 20 bp, Unknown
  Description of Unknown: gRNA target site sequence
cctgaacctctgtcacccag

SEQ ID NO: 2325 - DNA, 20 bp, Unknown
  Description of Unknown: gRNA target site sequence
gaacctctgtcacccaggag

SEQ ID NO: 2326 - DNA, 20 bp, Unknown
  Description of Unknown: gRNA target site sequence
tgtgtcttgatgcactgtac

SEQ ID NO: 2327 - DNA, 20 bp, Unknown
  Description of Unknown: gRNA target site sequence
gtaccagcctccgccttccc

SEQ ID NO: 2328 - DNA, 20 bp, Unknown
  Description of Unknown: gRNA target site sequence
cgccttccctggcattgttg

SEQ ID NO: 2329 - DNA, 20 bp, Unknown
  Description of Unknown: gRNA target site sequence
ccttccctggcattgttgta

SEQ ID NO: 2330 - DNA, 20 bp, Unknown
  Description of Unknown: gRNA target site sequence
tccctggcattgttgtagag

SEQ ID NO: 2331 - DNA, 20 bp, Unknown
  Description of Unknown: gRNA target site sequence
ctggcattgttgtagagtgg

SEQ ID NO: 2332 - DNA, 20 bp, Unknown
  Description of Unknown: gRNA target site sequence
tgtagagtggaagatgttgt

SEQ ID NO: 2333 - DNA, 20 bp, Unknown
  Description of Unknown: gRNA target site sequence
gtggaagatgttgttagatg

SEQ ID NO: 2334 - DNA, 20 bp, Unknown
  Description of Unknown: gRNA target site sequence
tggaagatgttgttagatga

SEQ ID NO: 2335 - DNA, 20 bp, Unknown
  Description of Unknown: gRNA target site sequence
aagatgttgttagatgaagg

SEQ ID NO: 2336 - DNA, 20 bp, Unknown
  Description of Unknown: gRNA target site sequence
ttgttagatgaaggaagcca

SEQ ID NO: 2337 - DNA, 20 bp, Unknown
  Description of Unknown: gRNA target site sequence
gttagatgaaggaagccaca

SEQ ID NO: 2338 - DNA, 20 bp, Unknown
  Description of Unknown: gRNA target site sequence
atgaaggaagccacagagcc

SEQ ID NO: 2339 - DNA, 20 bp, Unknown
  Description of Unknown: gRNA target site sequence
tgaaggaagccacagagccg

SEQ ID NO: 2340 - DNA, 20 bp, Unknown
  Description of Unknown: gRNA target site sequence
gaaggaagccacagagccga

SEQ ID NO: 2341 - DNA, 20 bp, Unknown
  Description of Unknown: gRNA target site sequence
agccacagagccgagggcac

SEQ ID NO: 2342 - DNA, 20 bp, Unknown
  Description of Unknown: gRNA target site sequence
gccacagagccgagggcacc

SEQ ID NO: 2343 - DNA, 20 bp, Unknown
  Description of Unknown: gRNA target site sequence
gcaccaggtcgcttcctctc

SEQ ID NO: 2344 - DNA, 20 bp, Unknown
  Description of Unknown: gRNA target site sequence
caccaggtcgcttcctctct

SEQ ID NO: 2345 - DNA, 20 bp, Unknown
  Description of Unknown: gRNA target site sequence
ggtcgcttcctctctaggtt

SEQ ID NO: 2346 - DNA, 20 bp, Unknown
  Description of Unknown: gRNA target site sequence
gtcgcttcctctctaggttg

SEQ ID NO: 2347 - DNA, 20 bp, Unknown
  Description of Unknown: gRNA target site sequence
aaccctgctgttaactcctg

SEQ ID NO: 2348 - DNA, 20 bp, Unknown
  Description of Unknown: gRNA target site sequence
accctgctgttaactcctgt

SEQ ID NO: 2349 - DNA, 20 bp, Unknown
  Description of Unknown: gRNA target site sequence
tcctttgttctcttttccca

SEQ ID NO: 2350 - DNA, 20 bp, Unknown
  Description of Unknown: gRNA target site sequence
cctttgttctcttttcccac

SEQ ID NO: 2351 - DNA, 20 bp, Unknown
  Description of Unknown: gRNA target site sequence
ttctcttttcccacaggata

SEQ ID NO: 2352 - DNA, 20 bp, Unknown
  Description of Unknown: gRNA target site sequence
tctcttttcccacaggataa

SEQ ID NO: 2353 - DNA, 20 bp, Unknown
  Description of Unknown: gRNA target site sequence
tcttttcccacaggataaag

SEQ ID NO: 2354 - DNA, 20 bp, Unknown
  Description of Unknown: gRNA target site sequence
tcccacaggataaaggagac

SEQ ID NO: 2355 - DNA, 20 bp, Unknown
  Description of Unknown: gRNA target site sequence
aaggagaccagctctccata

SEQ ID NO: 2356 - DNA, 20 bp, Unknown
  Description of Unknown: gRNA target site sequence
ggagaccagctctccataca

SEQ ID NO: 2357 - DNA, 20 bp, Unknown
  Description of Unknown: gRNA target site sequence
agaccagctctccatacaga

SEQ ID NO: 2358 - DNA, 20 bp, Unknown
  Description of Unknown: gRNA target site sequence
gaccagctctccatacagag

SEQ ID NO: 2359 - DNA, 20 bp, Unknown
  Description of Unknown: gRNA target site sequence
ggcttgcatcaactcaaaaa

SEQ ID NO: 2360 - DNA, 20 bp, Unknown
  Description of Unknown: gRNA target site sequence
ttgcatcaactcaaaaatag

SEQ ID NO: 2361 - DNA, 20 bp, Unknown
  Description of Unknown: gRNA target site sequence
attaccttcctgtaactaac

SEQ ID NO: 2362 - DNA, 20 bp, Unknown
  Description of Unknown: gRNA target site sequence
ttaccttcctgtaactaacc

SEQ ID NO: 2363 - DNA, 20 bp, Unknown
  Description of Unknown: gRNA target site sequence
taactaaccaggcccctctc

SEQ ID NO: 2364 - DNA, 20 bp, Unknown
  Description of Unknown: gRNA target site sequence
taaccaggcccctctccagt

SEQ ID NO: 2365 - DNA, 20 bp, Unknown
  Description of Unknown: gRNA target site sequence
ccctctccagtcagtctgac

SEQ ID NO: 2366 - DNA, 20 bp, Unknown
  Description of Unknown: gRNA target site sequence
tacaataaataacattcaat

SEQ ID NO: 2367 - DNA, 20 bp, Unknown
  Description of Unknown: gRNA target site sequence
ccaattccaatctatcactc

SEQ ID NO: 2368 - DNA, 20 bp, Unknown
  Description of Unknown: gRNA target site sequence
atcactctggtctgaatttc

SEQ ID NO: 2369 - DNA, 20 bp, Unknown
  Description of Unknown: gRNA target site sequence
tcactctggtctgaatttct

SEQ ID NO: 2370 - DNA, 20 bp, Unknown
  Description of Unknown: gRNA target site sequence
gcttataaatcaccctatat

SEQ ID NO: 2371 - DNA, 20 bp, Unknown
  Description of Unknown: gRNA target site sequence
ttataaatcaccctatatta

SEQ ID NO: 2372 - DNA, 20 bp, Unknown
  Description of Unknown: gRNA target site sequence
tcaccctatattagagacac

SEQ ID NO: 2373 - DNA, 20 bp, Unknown
  Description of Unknown: gRNA target site sequence
agacactagtcccttccacc

SEQ ID NO: 2374 - DNA, 20 bp, Unknown
  Description of Unknown: gRNA target site sequence
cttccaccaagccacttgca

SEQ ID NO: 2375 - DNA, 20 bp, Unknown
  Description of Unknown: gRNA target site sequence
ttccaccaagccacttgcac

SEQ ID NO: 2376 - DNA, 20 bp, Unknown
  Description of Unknown: gRNA target site sequence
ttgcacgggacatctgtcct

SEQ ID NO: 2377 - DNA, 20 bp, Unknown
  Description of Unknown: gRNA target site sequence
cacgggacatctgtcctcag

SEQ ID NO: 2378 - DNA, 20 bp, Unknown
  Description of Unknown: gRNA target site sequence
cgggacatctgtcctcagaa

SEQ ID NO: 2379 - DNA, 20 bp, Unknown
  Description of Unknown: gRNA target site sequence
tctgtcctcagaagagaaaa

SEQ ID NO: 2380 - DNA, 20 bp, Unknown
  Description of Unknown: gRNA target site sequence
cctcagaagagaaaacagtt

SEQ ID NO: 2381 - DNA, 20 bp, Unknown
  Description of Unknown: gRNA target site sequence
cagaagagaaaacagtttgg

SEQ ID NO: 2382 - DNA, 20 bp, Unknown
  Description of Unknown: gRNA target site sequence
aagagaaaacagtttggcag

SEQ ID NO: 2383 - DNA, 20 bp, Unknown
  Description of Unknown: gRNA target site sequence
agccattgtcatgtctattc

SEQ ID NO: 2384 - DNA, 20 bp, Unknown
  Description of Unknown: gRNA target site sequence
cattgtcatgtctattccag

SEQ ID NO: 2385 - DNA, 20 bp, Unknown
  Description of Unknown: gRNA target site sequence
catgtctattccagcagctc

SEQ ID NO: 2386 - DNA, 20 bp, Unknown
  Description of Unknown: gRNA target site sequence
tctattccagcagctctagc

SEQ ID NO: 2387 - DNA, 20 bp, Unknown
  Description of Unknown: gRNA target site sequence
ttccagcagctctagctagc

SEQ ID NO: 2388 - DNA, 20 bp, Unknown
  Description of Unknown: gRNA target site sequence
agctctagctagctagacta

SEQ ID NO: 2389 - DNA, 20 bp, Unknown
  Description of Unknown: gRNA target site sequence
taaccctcacctctgcctat

SEQ ID NO: 2390 - DNA, 20 bp, Unknown
  Description of Unknown: gRNA target site sequence
accctcacctctgcctatca

SEQ ID NO: 2391 - DNA, 20 bp, Unknown
  Description of Unknown: gRNA target site sequence
gcctatcagagatgccctct

SEQ ID NO: 2392 - DNA, 20 bp, Unknown
  Description of Unknown: gRNA target site sequence
agatgccctctgagcatcct

SEQ ID NO: 2393 - DNA, 20 bp, Unknown
  Description of Unknown: gRNA target site sequence
gcactgtgataactccattg

SEQ ID NO: 2394 - DNA, 20 bp, Unknown
  Description of Unknown: gRNA target site sequence
ctgtgataactccattgcag

SEQ ID NO: 2395 - DNA, 20 bp, Unknown
  Description of Unknown: gRNA target site sequence
ttactttctgctctgtatta

SEQ ID NO: 2396 - DNA, 20 bp, Unknown
  Description of Unknown: gRNA target site sequence
tctgtattaaagttatttgt

SEQ ID NO: 2397 - DNA, 20 bp, Unknown
  Description of Unknown: gRNA target site sequence
tctcctcactcttttacttg

SEQ ID NO: 2398 - DNA, 20 bp, Unknown
  Description of Unknown: gRNA target site sequence
tgtggttcatgaactcctgt

SEQ ID NO: 2399 - DNA, 20 bp, Unknown
  Description of Unknown: gRNA target site sequence
ggttcatgaactcctgtgag

SEQ ID NO: 2400 - DNA, 20 bp, Unknown
  Description of Unknown: gRNA target site sequence
actcctgtgagcagtgatta

SEQ ID NO: 2401 - DNA, 20 bp, Unknown
  Description of Unknown: gRNA target site sequence
gcagtgattatagcccaccc

SEQ ID NO: 2402 - DNA, 20 bp, Unknown
  Description of Unknown: gRNA target site sequence
tgattatagcccacccaagt

SEQ ID NO: 2403 - DNA, 20 bp, Unknown
  Description of Unknown: gRNA target site sequence
atctttattgtattgactct

SEQ ID NO: 2404 - DNA, 20 bp, Unknown
  Description of Unknown: gRNA target site sequence
attgtattgactctaagctt

SEQ ID NO: 2405 - DNA, 20 bp, Unknown
  Description of Unknown: gRNA target site sequence
aaatgtcctgccctctcccc

SEQ ID NO: 2406 - DNA, 20 bp, Unknown
  Description of Unknown: gRNA target site sequence
gtcctgccctctccccaagc

SEQ ID NO: 2407 - DNA, 20 bp, Unknown
  Description of Unknown: gRNA target site sequence
acactcatcaccactaaatg

SEQ ID NO: 2408 - DNA, 20 bp, Unknown
  Description of Unknown: gRNA target site sequence
tgcggtcacactcaactttc

SEQ ID NO: 2409 - DNA, 20 bp, Unknown
  Description of Unknown: gRNA target site sequence
cacactcaactttccagtat

SEQ ID NO: 2410 - DNA, 20 bp, Unknown
  Description of Unknown: gRNA target site sequence
acactcaactttccagtatt

SEQ ID NO: 2411 - DNA, 20 bp, Unknown
  Description of Unknown: gRNA target site sequence
actcaactttccagtattgg

SEQ ID NO: 2412 - DNA, 20 bp, Unknown
  Description of Unknown: gRNA target site sequence
ctcaactttccagtattggg

SEQ ID NO: 2413 - DNA, 20 bp, Unknown
  Description of Unknown: gRNA target site sequence
tcaactttccagtattggga

SEQ ID NO: 2414 - DNA, 20 bp, Unknown
  Description of Unknown: gRNA target site sequence
tattgggagggtcctgttac

SEQ ID NO: 2415 - DNA, 20 bp, Unknown
  Description of Unknown: gRNA target site sequence
ggagggtcctgttactggtt

SEQ ID NO: 2416 - DNA, 20 bp, Unknown
  Description of Unknown: gRNA target site sequence
tggttgagataaatttactt

SEQ ID NO: 2417 - DNA, 20 bp, Unknown
  Description of Unknown: gRNA target site sequence
ggttgagataaatttacttt

SEQ ID NO: 2418 - DNA, 20 bp, Unknown
  Description of Unknown: gRNA target site sequence
taggaaatttaaatacttct

SEQ ID NO: 2419 - DNA, 20 bp, Unknown
  Description of Unknown: gRNA target site sequence
ggaaatttaaatacttctaa

SEQ ID NO: 2420 - DNA, 20 bp, Unknown
  Description of Unknown: gRNA target site sequence
tatttaaaacatgtaaaaat

SEQ ID NO: 2421 - DNA, 20 bp, Unknown
  Description of Unknown: gRNA target site sequence
atatatgaatatttcttctc

SEQ ID NO: 2422 - DNA, 20 bp, Unknown
  Description of Unknown: gRNA target site sequence
taaatcatcaaatatctttt

SEQ ID NO: 2423 - DNA, 20 bp, Unknown
  Description of Unknown: gRNA target site sequence
cctacttcatacaaactaca

SEQ ID NO: 2424 - DNA, 20 bp, Unknown
  Description of Unknown: gRNA target site sequence
aactacatggtttcttaacc

SEQ ID NO: 2425 - DNA, 20 bp, Unknown
  Description of Unknown: gRNA target site sequence
tacatggtttcttaaccaag

SEQ ID NO: 2426 - DNA, 20 bp, Unknown
  Description of Unknown: gRNA target site sequence
acatggtttcttaaccaaga

SEQ ID NO: 2427 - DNA, 20 bp, Unknown
  Description of Unknown: gRNA target site sequence
gtttcttaaccaagaaggtc

SEQ ID NO: 2428 - DNA, 20 bp, Unknown
  Description of Unknown: gRNA target site sequence
ttcttaaccaagaaggtcta

SEQ ID NO: 2429 - DNA, 20 bp, Unknown
  Description of Unknown: gRNA target site sequence
cttaaccaagaaggtctaga

SEQ ID NO: 2430 - DNA, 20 bp, Unknown
  Description of Unknown: gRNA target site sequence
taaccaagaaggtctagaga

SEQ ID NO: 2431 - DNA, 20 bp, Unknown
  Description of Unknown: gRNA target site sequence
aagaaggtctagagagagat

SEQ ID NO: 2432 - DNA, 20 bp, Unknown
  Description of Unknown: gRNA target site sequence
agaaggtctagagagagata

SEQ ID NO: 2433 - DNA, 20 bp, Unknown
  Description of Unknown: gRNA target site sequence
gtctagagagagataaggtt

SEQ ID NO: 2434 - DNA, 20 bp, Unknown
  Description of Unknown: gRNA target site sequence
gagataaggttgagattcaa

SEQ ID NO: 2435 - DNA, 20 bp, Unknown
  Description of Unknown: gRNA target site sequence
atggatatactcatcatttt

SEQ ID NO: 2436 - DNA, 20 bp, Unknown
  Description of Unknown: gRNA target site sequence
tttaagccgtgtaacaaacc

SEQ ID NO: 2437 - DNA, 20 bp, Unknown
  Description of Unknown: gRNA target site sequence
ccgtgtaacaaacctggtgt

SEQ ID NO: 2438 - DNA, 20 bp, Unknown
  Description of Unknown: gRNA target site sequence
aaacctggtgtcagtctctg

SEQ ID NO: 2439 - DNA, 20 bp, Unknown
  Description of Unknown: gRNA target site sequence
acctggtgtcagtctctgaa

SEQ ID NO: 2440 - DNA, 20 bp, Unknown
  Description of Unknown: gRNA target site sequence
tctctgaagagctgaaaact

SEQ ID NO: 2441 - DNA, 20 bp, Unknown
  Description of Unknown: gRNA target site sequence
ctctgaagagctgaaaactg

SEQ ID NO: 2442 - DNA, 20 bp, Unknown
  Description of Unknown: gRNA target site sequence
ctgcatctgaaacccacacg

SEQ ID NO: 2443 - DNA, 20 bp, Unknown
  Description of Unknown: gRNA target site sequence
tgcatctgaaacccacacgt

SEQ ID NO: 2444 - DNA, 20 bp, Unknown
  Description of Unknown: gRNA target site sequence
tctgaaacccacacgtaggt

SEQ ID NO: 2445 - DNA, 20 bp, Unknown
  Description of Unknown: gRNA target site sequence
ctgaaacccacacgtaggtc

SEQ ID NO: 2446 - DNA, 20 bp, Unknown
  Description of Unknown: gRNA target site sequence
acgtaggtcaggcaacaatt

SEQ ID NO: 2447 - DNA, 20 bp, Unknown
  Description of Unknown: gRNA target site sequence
attaagtattgtatgccaaa

SEQ ID NO: 2448 - DNA, 20 bp, Unknown
  Description of Unknown: gRNA target site sequence
gtattgtatgccaaacagac

SEQ ID NO: 2449 - DNA, 20 bp, Unknown
  Description of Unknown: gRNA target site sequence
ttgtatgccaaacagactgg

SEQ ID NO: 2450 - DNA, 20 bp, Unknown
  Description of Unknown: gRNA target site sequence
ttttccttgtcttttttttt

SEQ ID NO: 2451 - DNA, 20 bp, Unknown
  Description of Unknown: gRNA target site sequence
aacttttatttttaaataat

SEQ ID NO: 2452 - DNA, 20 bp, Unknown
  Description of Unknown: gRNA target site sequence
tttttaaataattggctaat

SEQ ID NO: 2453 - DNA, 20 bp, Unknown
  Description of Unknown: gRNA target site sequence
taaataattggctaattagc

SEQ ID NO: 2454 - DNA, 20 bp, Unknown
  Description of Unknown: gRNA target site sequence
ataattggctaattagctag

SEQ ID NO: 2455 - DNA, 20 bp, Unknown
  Description of Unknown: gRNA target site sequence
attagctagtagaattgatt

SEQ ID NO: 2456 - DNA, 20 bp, Unknown
  Description of Unknown: gRNA target site sequence
tagctagtagaattgattaa

SEQ ID NO: 2457 - DNA, 20 bp, Unknown
  Description of Unknown: gRNA target site sequence
gaaccttaaaaccttgaatt

SEQ ID NO: 2458 - DNA, 20 bp, Unknown
  Description of Unknown: gRNA target site sequence
ttaaaaccttgaattaagta

SEQ ID NO: 2459 - DNA, 20 bp, Unknown
  Description of Unknown: gRNA target site sequence
aaaccttgaattaagtaaag

SEQ ID NO: 2460 - DNA, 20 bp, Unknown
  Description of Unknown: gRNA target site sequence
aaccttgaattaagtaaaga

SEQ ID NO: 2461 - DNA, 20 bp, Unknown
  Description of Unknown: gRNA target site sequence
aatttccctacattttaaac

SEQ ID NO: 2462 - DNA, 20 bp, Unknown
  Description of Unknown: gRNA target site sequence
tccctacattttaaacaagc

SEQ ID NO: 2463 - DNA, 20 bp, Unknown
  Description of Unknown: gRNA target site sequence
agctggctaattcatttata

SEQ ID NO: 2464 - DNA, 20 bp, Unknown
  Description of Unknown: gRNA target site sequence
tttataaagtatatgaatcc

SEQ ID NO: 2465 - DNA, 20 bp, Unknown
  Description of Unknown: gRNA target site sequence
ttataaagtatatgaatccg

SEQ ID NO: 2466 - DNA, 20 bp, Unknown
  Description of Unknown: gRNA target site sequence
ccttaaaaccttgaattgta

SEQ ID NO: 2467 - DNA, 20 bp, Unknown
  Description of Unknown: gRNA target site sequence
tatagcaaaaaaactcttcc

SEQ ID NO: 2468 - DNA, 20 bp, Unknown
  Description of Unknown: gRNA target site sequence
atagcaaaaaaactcttccc

SEQ ID NO: 2469 - DNA, 20 bp, Unknown
  Description of Unknown: gRNA target site sequence
actcttcccaggatttgctt

SEQ ID NO: 2470 - DNA, 20 bp, Unknown
  Description of Unknown: gRNA target site sequence
gcttaagtcaatttttttta

SEQ ID NO: 2471 - DNA, 20 bp, Unknown
  Description of Unknown: gRNA target site sequence
cttaagtcaattttttttaa

SEQ ID NO: 2472 - DNA, 20 bp, Unknown
  Description of Unknown: gRNA target site sequence
ttttttttaaaggaacttgt

SEQ ID NO: 2473 - DNA, 20 bp, Unknown
  Description of Unknown: gRNA target site sequence
tgtgagctcatcctgaaacc

SEQ ID NO: 2474 - DNA, 20 bp, Unknown
  Description of Unknown: gRNA target site sequence
aaacccagctcaaatgtatt

SEQ ID NO: 2475 - DNA, 20 bp, Unknown
  Description of Unknown: gRNA target site sequence
aacccagctcaaatgtattc

SEQ ID NO: 2476 - DNA, 20 bp, Unknown
  Description of Unknown: gRNA target site sequence
ctcaaatgtattcaggacta

SEQ ID NO: 2477 - DNA, 20 bp, Unknown
  Description of Unknown: gRNA target site sequence
tttccctcttaaatcacttc

SEQ ID NO: 2478 - DNA, 20 bp, Unknown
  Description of Unknown: gRNA target site sequence
ttaaatcacttccagtctca

SEQ ID NO: 2479 - DNA, 20 bp, Unknown
  Description of Unknown: gRNA target site sequence
aatcacttccagtctcatag

SEQ ID NO: 2480 - DNA, 20 bp, Unknown
  Description of Unknown: gRNA target site sequence
atcacttccagtctcataga

SEQ ID NO: 2481 - DNA, 20 bp, Unknown
  Description of Unknown: gRNA target site sequence
tcacttccagtctcatagaa

SEQ ID NO: 2482 - DNA, 20 bp, Unknown
  Description of Unknown: gRNA target site sequence
ccaactcacatgcattcatg

SEQ ID NO: 2483 - DNA, 20 bp, Unknown
  Description of Unknown: gRNA target site sequence
tgaagcccctactaaatacc

SEQ ID NO: 2484 - DNA, 20 bp, Unknown
  Description of Unknown: gRNA target site sequence
aatacctggcgctctgttct

SEQ ID NO: 2485 - DNA, 20 bp, Unknown
  Description of Unknown: gRNA target site sequence
gccgcccaactgctccctgc

SEQ ID NO: 2486 - DNA, 20 bp, Unknown
  Description of Unknown: gRNA target site sequence
caactgctccctgctggccc

SEQ ID NO: 2487 - DNA, 20 bp, Unknown
  Description of Unknown: gRNA target site sequence
tccctgctggccctggaata

SEQ ID NO: 2488 - DNA, 20 bp, Unknown
  Description of Unknown: gRNA target site sequence
cctgctggccctggaataca

SEQ ID NO: 2489 - DNA, 20 bp, Unknown
  Description of Unknown: gRNA target site sequence
ctggccctggaatacagagc

SEQ ID NO: 2490 - DNA, 20 bp, Unknown
  Description of Unknown: gRNA target site sequence
cctggaatacagagccagcc

SEQ ID NO: 2491 - DNA, 20 bp, Unknown
  Description of Unknown: gRNA target site sequence
gaatacagagccagccaagc

SEQ ID NO: 2492 - DNA, 20 bp, Unknown
  Description of Unknown: gRNA target site sequence
cagagccagccaagccagat

SEQ ID NO: 2493 - DNA, 20 bp, Unknown
  Description of Unknown: gRNA target site sequence
gagccagccaagccagattg

SEQ ID NO: 2494 - DNA, 20 bp, Unknown
  Description of Unknown: gRNA target site sequence
ggagttttacctttaacttc

SEQ ID NO: 2495 - DNA, 20 bp, Unknown
  Description of Unknown: gRNA target site sequence
ctgctgaaacaaatgaaacc

SEQ ID NO: 2496 - DNA, 20 bp, Unknown
  Description of Unknown: gRNA target site sequence
tgctgaaacaaatgaaaccc

SEQ ID NO: 2497 - DNA, 20 bp, Unknown
  Description of Unknown: gRNA target site sequence
tgaaacaaatgaaacccagg

SEQ ID NO: 2498 - DNA, 20 bp, Unknown
  Description of Unknown: gRNA target site sequence
gaaacaaatgaaacccaggt

SEQ ID NO: 2499 - DNA, 20 bp, Unknown
  Description of Unknown: gRNA target site sequence
aacaaatgaaacccaggtag

SEQ ID NO: 2500 - DNA, 20 bp, Unknown
  Description of Unknown: gRNA target site sequence
cctccatcttcatgctccaa

SEQ ID NO: 2501 - DNA, 20 bp, Unknown
  Description of Unknown: gRNA target site sequence
aaaagtctcactcacctttg

SEQ ID NO: 2502 - DNA, 20 bp, Unknown
  Description of Unknown: gRNA target site sequence
agtctcactcacctttgcag

SEQ ID NO: 2503 - DNA, 20 bp, Unknown
  Description of Unknown: gRNA target site sequence
tcactcacctttgcagaaga

SEQ ID NO: 2504 - DNA, 20 bp, Unknown
  Description of Unknown: gRNA target site sequence
cactcacctttgcagaagac

SEQ ID NO: 2505 - DNA, 20 bp, Unknown
  Description of Unknown: gRNA target site sequence
actcacctttgcagaagaca

SEQ ID NO: 2506 - DNA, 20 bp, Unknown
  Description of Unknown: gRNA target site sequence
ctttgcagaagacagggatg

SEQ ID NO: 2507 - DNA, 20 bp, Unknown
  Description of Unknown: gRNA target site sequence
ttgcagaagacagggatgaa

SEQ ID NO: 2508 - DNA, 20 bp, Unknown
  Description of Unknown: gRNA target site sequence
cagaagacagggatgaagag

SEQ ID NO: 2509 - DNA, 20 bp, Unknown
  Description of Unknown: gRNA target site sequence
gggatgaagagaagaaaaaa

SEQ ID NO: 2510 - DNA, 20 bp, Unknown
  Description of Unknown: gRNA target site sequence
ggatgaagagaagaaaaaac

SEQ ID NO: 2511 - DNA, 20 bp, Unknown
  Description of Unknown: gRNA target site sequence
atgaagagaagaaaaaacag

SEQ ID NO: 2512 - DNA, 20 bp, Unknown
  Description of Unknown: gRNA target site sequence
gaagagaagaaaaaacagga

SEQ ID NO: 2513 - DNA, 20 bp, Unknown
  Description of Unknown: gRNA target site sequence
gaagaaaaaacaggagagtg

SEQ ID NO: 2514 - DNA, 20 bp, Unknown
  Description of Unknown: gRNA target site sequence
aagaaaaaacaggagagtgc

SEQ ID NO: 2515 - DNA, 20 bp, Unknown
  Description of Unknown: gRNA target site sequence
agaaaaaacaggagagtgca

SEQ ID NO: 2516 - DNA, 20 bp, Unknown
  Description of Unknown: gRNA target site sequence
aaaacaggagagtgcagggc

SEQ ID NO: 2517 - DNA, 20 bp, Unknown
  Description of Unknown: gRNA target site sequence
aaacaggagagtgcagggcc

SEQ ID NO: 2518 - DNA, 20 bp, Unknown
  Description of Unknown: gRNA target site sequence
gagagtgcagggccaggtcc

SEQ ID NO: 2519 - DNA, 20 bp, Unknown
  Description of Unknown: gRNA target site sequence
agtgcagggccaggtcctgg

SEQ ID NO: 2520 - DNA, 20 bp, Unknown
  Description of Unknown: gRNA target site sequence
cagggccaggtcctggtagc

SEQ ID NO: 2521 - DNA, 20 bp, Unknown
  Description of Unknown: gRNA target site sequence
agggccaggtcctggtagcc

SEQ ID NO: 2522 - DNA, 20 bp, Unknown
  Description of Unknown: gRNA target site sequence
caggtcctggtagccaggtt

SEQ ID NO: 2523 - DNA, 20 bp, Unknown
  Description of Unknown: gRNA target site sequence
cctggtagccaggttcagct

SEQ ID NO: 2524 - DNA, 20 bp, Unknown
  Description of Unknown: gRNA target site sequence
gccttgtgccgctgaaatcc

SEQ ID NO: 2525 - DNA, 20 bp, Unknown
  Description of Unknown: gRNA target site sequence
ccttgtgccgctgaaatcca

SEQ ID NO: 2526 - DNA, 20 bp, Unknown
  Description of Unknown: gRNA target site sequence
gtgccgctgaaatccaaggc

SEQ ID NO: 2527 - DNA, 20 bp, Unknown
  Description of Unknown: gRNA target site sequence
ctgaaatccaaggcaagcca

SEQ ID NO: 2528 - DNA, 20 bp, Unknown
  Description of Unknown: gRNA target site sequence
caaggcaagccatggcttta

SEQ ID NO: 2529 - DNA, 20 bp, Unknown
  Description of Unknown: gRNA target site sequence
aaggcaagccatggctttat

SEQ ID NO: 2530 - DNA, 20 bp, Unknown
  Description of Unknown: gRNA target site sequence
ggcaagccatggctttatgg

SEQ ID NO: 2531 - DNA, 20 bp, Unknown
  Description of Unknown: gRNA target site sequence
aagccatggctttatgggag

SEQ ID NO: 2532 - DNA, 20 bp, Unknown
  Description of Unknown: gRNA target site sequence
ggctttatgggagcggtgtt

SEQ ID NO: 2533 - DNA, 20 bp, Unknown
  Description of Unknown: gRNA target site sequence
gctttatgggagcggtgttc

SEQ ID NO: 2534 - DNA, 20 bp, Unknown
  Description of Unknown: gRNA target site sequence
gggagcggtgttcaggtctt

SEQ ID NO: 2535 - DNA, 20 bp, Unknown
  Description of Unknown: gRNA target site sequence
ggagcggtgttcaggtcttc

SEQ ID NO: 2536 - DNA, 20 bp, Unknown
  Description of Unknown: gRNA target site sequence
gcggtgttcaggtcttcagg

SEQ ID NO: 2537 - DNA, 20 bp, Unknown
  Description of Unknown: gRNA target site sequence
gtgttcaggtcttcaggaag

SEQ ID NO: 2538 - DNA, 20 bp, Unknown
  Description of Unknown: gRNA target site sequence
gttcaggtcttcaggaagta

SEQ ID NO: 2539 - DNA, 20 bp, Unknown
  Description of Unknown: gRNA target site sequence
ggaagtagagcaaaaccttt

SEQ ID NO: 2540 - DNA, 20 bp, Unknown
  Description of Unknown: gRNA target site sequence
gaagtagagcaaaacctttc

SEQ ID NO: 2541 - DNA, 20 bp, Unknown
  Description of Unknown: gRNA target site sequence
caaaacctttcaggatcctg

SEQ ID NO: 2542 - DNA, 20 bp, Unknown
  Description of Unknown: gRNA target site sequence
gaaatgtgtttgaacccaca

SEQ ID NO: 2543 - DNA, 20 bp, Unknown
  Description of Unknown: gRNA target site sequence
gtttgaacccacacagaatc

SEQ ID NO: 2544 - DNA, 20 bp, Unknown
  Description of Unknown: gRNA target site sequence
tttgaacccacacagaatca

SEQ ID NO: 2545 - DNA, 20 bp, Unknown
  Description of Unknown: gRNA target site sequence
acagaatcaaggactttata

SEQ ID NO: 2546 - DNA, 20 bp, Unknown
  Description of Unknown: gRNA target site sequence
aatcaaggactttatataga

SEQ ID NO: 2547 - DNA, 20 bp, Unknown
  Description of Unknown: gRNA target site sequence
tatatagatagctttgatcc

SEQ ID NO: 2548 - DNA, 20 bp, Unknown
  Description of Unknown: gRNA target site sequence
gtattacacatgtgcacaca

SEQ ID NO: 2549 - DNA, 20 bp, Unknown
  Description of Unknown: gRNA target site sequence
ttacacatgtgcacacacag

SEQ ID NO: 2550 - DNA, 20 bp, Unknown
  Description of Unknown: gRNA target site sequence
tacacatgtgcacacacaga

SEQ ID NO: 2551 - DNA, 20 bp, Unknown
  Description of Unknown: gRNA target site sequence
acacacagaaggcacttgaa

SEQ ID NO: 2552 - DNA, 20 bp, Unknown
  Description of Unknown: gRNA target site sequence
acagaaggcacttgaataga

SEQ ID NO: 2553 - DNA, 20 bp, Unknown
  Description of Unknown: gRNA target site sequence
aatagaaagcctttttgttt

SEQ ID NO: 2554 - DNA, 20 bp, Unknown
  Description of Unknown: gRNA target site sequence
cctttttgttttggttttac

SEQ ID NO: 2555 - DNA, 20 bp, Unknown
  Description of Unknown: gRNA target site sequence
tttgttttggttttacgaga

SEQ ID NO: 2556 - DNA, 20 bp, Unknown
  Description of Unknown: gRNA target site sequence
ttgttttggttttacgagaa

SEQ ID NO: 2557 - DNA, 20 bp, Unknown
  Description of Unknown: gRNA target site sequence
ttttggttttacgagaaagg

SEQ ID NO: 2558 - DNA, 20 bp, Unknown
  Description of Unknown: gRNA target site sequence
ttttacgagaaaggaagccg

SEQ ID NO: 2559 - DNA, 20 bp, Unknown
  Description of Unknown: gRNA target site sequence
tttacgagaaaggaagccgt

SEQ ID NO: 2560 - DNA, 20 bp, Unknown
  Description of Unknown: gRNA target site sequence
gagaaaggaagccgtgggtt

SEQ ID NO: 2561 - DNA, 20 bp, Unknown
  Description of Unknown: gRNA target site sequence
ggtttagctgttacgtcgaa

SEQ ID NO: 2562 - DNA, 20 bp, Unknown
  Description of Unknown: gRNA target site sequence
tacgtcgaaaagacaacctc

SEQ ID NO: 2563 - DNA, 20 bp, Unknown
  Description of Unknown: gRNA target site sequence
agcactcaactgaacaaaac

SEQ ID NO: 2564 - DNA, 20 bp, Unknown
  Description of Unknown: gRNA target site sequence
gaacaaaacaagccaatcca

SEQ ID NO: 2565 - DNA, 20 bp, Unknown
  Description of Unknown: gRNA target site sequence
aaaacaagccaatccatgga

SEQ ID NO: 2566 - DNA, 20 bp, Unknown
  Description of Unknown: gRNA target site sequence
atgtattcaatttgaaactg

SEQ ID NO: 2567 - DNA, 20 bp, Unknown
  Description of Unknown: gRNA target site sequence
tgaagcttcatgttcacttt

SEQ ID NO: 2568 - DNA, 20 bp, Unknown
  Description of Unknown: gRNA target site sequence
gaagcttcatgttcactttg

SEQ ID NO: 2569 - DNA, 20 bp, Unknown
  Description of Unknown: gRNA target site sequence
tcatgttcactttgaggatc

SEQ ID NO: 2570 - DNA, 20 bp, Unknown
  Description of Unknown: gRNA target site sequence
ctttgaggatctggataact

SEQ ID NO: 2571 - DNA, 20 bp, Unknown
  Description of Unknown: gRNA target site sequence
tgaggatctggataactaag

SEQ ID NO: 2572 - DNA, 20 bp, Unknown
  Description of Unknown: gRNA target site sequence
aggatctggataactaagtg

SEQ ID NO: 2573 - DNA, 20 bp, Unknown
  Description of Unknown: gRNA target site sequence
tggataactaagtggagact

SEQ ID NO: 2574 - DNA, 20 bp, Unknown
  Description of Unknown: gRNA target site sequence
gataactaagtggagacttg

SEQ ID NO: 2575 - DNA, 20 bp, Unknown
  Description of Unknown: gRNA target site sequence
tggagacttggagaatttcc

SEQ ID NO: 2576 - DNA, 20 bp, Unknown
  Description of Unknown: gRNA target site sequence
gagacttggagaatttcctg

SEQ ID NO: 2577 - DNA, 20 bp, Unknown
  Description of Unknown: gRNA target site sequence
tggagaatttcctggagtac

SEQ ID NO: 2578 - DNA, 20 bp, Unknown
  Description of Unknown: gRNA target site sequence
ggagaatttcctggagtaca

SEQ ID NO: 2579 - DNA, 20 bp, Unknown
  Description of Unknown: gRNA target site sequence
gagaatttcctggagtacaa

SEQ ID NO: 2580 - DNA, 20 bp, Unknown
  Description of Unknown: gRNA target site sequence
cccaattttattcaatcttc

SEQ ID NO: 2581 - DNA, 20 bp, Unknown
  Description of Unknown: gRNA target site sequence
ccaattttattcaatcttct

SEQ ID NO: 2582 - DNA, 20 bp, Unknown
  Description of Unknown: gRNA target site sequence
tctgggcatccttaaccatc

SEQ ID NO: 2583 - DNA, 20 bp, Unknown
  Description of Unknown: gRNA target site sequence
attgacaactccaaaactac

SEQ ID NO: 2584 - DNA, 20 bp, Unknown
  Description of Unknown: gRNA target site sequence
ttgacaactccaaaactact

SEQ ID NO: 2585 - DNA, 20 bp, Unknown
  Description of Unknown: gRNA target site sequence
tactaggctgctaactttct

SEQ ID NO: 2586 - DNA, 20 bp, Unknown
  Description of Unknown: gRNA target site sequence
ctgctaactttctgagccct

SEQ ID NO: 2587 - DNA, 20 bp, Unknown
  Description of Unknown: gRNA target site sequence
tgctaactttctgagccctt

SEQ ID NO: 2588 - DNA, 20 bp, Unknown
  Description of Unknown: gRNA target site sequence
tttctgagcccttgggctaa

SEQ ID NO: 2589 - DNA, 20 bp, Unknown
  Description of Unknown: gRNA target site sequence
ctgagcccttgggctaatgg

SEQ ID NO: 2590 - DNA, 20 bp, Unknown
  Description of Unknown: gRNA target site sequence
tgagcccttgggctaatggc

SEQ ID NO: 2591 - DNA, 20 bp, Unknown
  Description of Unknown: gRNA target site sequence
ggctaatggcaggatttgtc

SEQ ID NO: 2592 - DNA, 20 bp, Unknown
  Description of Unknown: gRNA target site sequence
gctaatggcaggatttgtct

SEQ ID NO: 2593 - DNA, 20 bp, Unknown
  Description of Unknown: gRNA target site sequence
aaaactgtattctatctgtg

SEQ ID NO: 2594 - DNA, 20 bp, Unknown
  Description of Unknown: gRNA target site sequence
gtgaagcaccatccttctaa

SEQ ID NO: 2595 - DNA, 20 bp, Unknown
  Description of Unknown: gRNA target site sequence
tccttctaatggtcccttga

SEQ ID NO: 2596 - DNA, 20 bp, Unknown
  Description of Unknown: gRNA target site sequence
cccttgacagctttacaaat

SEQ ID NO: 2597 - DNA, 20 bp, Unknown
  Description of Unknown: gRNA target site sequence
ttatttctcctaaatccatt

SEQ ID NO: 2598 - DNA, 20 bp, Unknown
  Description of Unknown: gRNA target site sequence
tcctaaatccatttagcatt

SEQ ID NO: 2599 - DNA, 20 bp, Unknown
  Description of Unknown: gRNA target site sequence
aatccatttagcatttggtt

SEQ ID NO: 2600 - DNA, 20 bp, Unknown
  Description of Unknown: gRNA target site sequence
tccatttagcatttggttaa

SEQ ID NO: 2601 - DNA, 20 bp, Unknown
  Description of Unknown: gRNA target site sequence
gagaaaaaaactaaaatcac

SEQ ID NO: 2602 - DNA, 20 bp, Unknown
  Description of Unknown: gRNA target site sequence
cacaagaaataaactgaaaa

SEQ ID NO: 2603 - DNA, 26 bp, Unknown
  Description of Unknown: gRNA target site sequence
tatgcccaggtagtatggcggtgggt

SEQ ID NO: 2604 - DNA, 26 bp, Unknown
  Description of Unknown: gRNA target site sequence
gagctatatagctccggaactataat

SEQ ID NO: 2605 - DNA, 26 bp, Unknown
  Description of Unknown: gRNA target site sequence
cggctataaacgtctcatacgtaaat

SEQ ID NO: 2606 - DNA, 26 bp, Unknown
  Description of Unknown: gRNA target site sequence
acgtatgagacgtttatagccgaaat

SEQ ID NO: 2607 - DNA, 26 bp, Unknown
  Description of Unknown: gRNA target site sequence
catagcagtgcttgattgcgtggaat

SEQ ID NO: 2608 - DNA, 26 bp, Unknown
  Description of Unknown: gRNA target site sequence
tatgagacgtttatagccgaaatgat

SEQ ID NO: 2609 - DNA, 26 bp, Unknown
  Description of Unknown: gRNA target site sequence
aactccggaaaacgaccaccacagat

SEQ ID NO: 2610 - DNA, 26 bp, Unknown
  Description of Unknown: gRNA target site sequence
gtgttaacccacgttatatcccaaat

SEQ ID NO: 2611 - DNA, 26 bp, Unknown
  Description of Unknown: gRNA target site sequence
gtgcggcaacctacatgatggggaat

SEQ ID NO: 2612 - DNA, 26 bp, Unknown
  Description of Unknown: gRNA target site sequence
atgtaggttgccgcacagacttcagt

SEQ ID NO: 2613 - DNA, 26 bp, Unknown
  Description of Unknown: gRNA target site sequence
aattgttgcctgacctacgtgtgggt

SEQ ID NO: 2614 - DNA, 26 bp, Unknown
  Description of Unknown: gRNA target site sequence
tgacctcatccagtttccaagctagt

SEQ ID NO: 2615 - DNA, 26 bp, Unknown
  Description of Unknown: gRNA target site sequence
gaggtccacccctaaattgcatgggt

SEQ ID NO: 2616 - DNA, 26 bp, Unknown
  Description of Unknown: gRNA target site sequence
tttccactggaggtgcccgtgcagat

SEQ ID NO: 2617 - DNA, 26 bp, Unknown
  Description of Unknown: gRNA target site sequence
ttgcagatccagaaccgtgcccagat

SEQ ID NO: 2618 - DNA, 26 bp, Unknown
  Description of Unknown: gRNA target site sequence
gaagtctgtgcggcaacctacatgat

SEQ ID NO: 2619 - DNA, 26 bp, Unknown
  Description of Unknown: gRNA target site sequence
aacccacacgtaggtcaggcaacaat

SEQ ID NO: 2620 - DNA, 26 bp, Unknown
  Description of Unknown: gRNA target site sequence
tcagctgagccttgtgccgctgaaat

SEQ ID NO: 2621 - DNA, 26 bp, Unknown
  Description of Unknown: gRNA target site sequence
ggaacccaaattacgtgtactacaat

SEQ ID NO: 2622 - DNA, 26 bp, Unknown
  Description of Unknown: gRNA target site sequence
tgtgaccgcatttagtggtgatgagt

SEQ ID NO: 2623 - DNA, 26 bp, Unknown
  Description of Unknown: gRNA target site sequence
caaatgccaatgcctacggttctagt

SEQ ID NO: 2624 - DNA, 26 bp, Unknown
  Description of Unknown: gRNA target site sequence
gtttcaatttgagtaaccgttgcaat

SEQ ID NO: 2625 - DNA, 26 bp, Unknown
  Description of Unknown: gRNA target site sequence
atgtggggaaaacacacacctgtggt

SEQ ID NO: 2626 - DNA, 26 bp, Unknown
  Description of Unknown: gRNA target site sequence
catgttattgcaacggttactcaaat

SEQ ID NO: 2627 - DNA, 26 bp, Unknown
  Description of Unknown: gRNA target site sequence
tggctttatgggagcggtgttcaggt

SEQ ID NO: 2628 - DNA, 26 bp, Unknown
  Description of Unknown: gRNA target site sequence
acctattggtgggctacccatgcaat

SEQ ID NO: 2629 - DNA, 26 bp, Unknown
  Description of Unknown: gRNA target site sequence
tctgaggacagatgtcccgtgcaagt

SEQ ID NO: 2630 - DNA, 26 bp, Unknown
  Description of Unknown: gRNA target site sequence
ggaagttggggctctcgctctggagt

SEQ ID NO: 2631 - DNA, 26 bp, Unknown
  Description of Unknown: gRNA target site sequence
caaaagtacagatcaaacgtcatgat

SEQ ID NO: 2632 - DNA, 26 bp, Unknown
  Description of Unknown: gRNA target site sequence
tataaagttggatgcggaacccaaat

SEQ ID NO: 2633 - DNA, 26 bp, Unknown
  Description of Unknown: gRNA target site sequence
gtacaagggtcctcctaaatcccaat

SEQ ID NO: 2634 - DNA, 26 bp, Unknown
  Description of Unknown: gRNA target site sequence
gatggtgcaccatgtctgatggggat

SEQ ID NO: 2635 - DNA, 26 bp, Unknown
  Description of Unknown: gRNA target site sequence
gaaagttgagtgtgaccgcatttagt

SEQ ID NO: 2636 - DNA, 26 bp, Unknown
  Description of Unknown: gRNA target site sequence
tgcctatgcccaggtagtatggcggt

SEQ ID NO: 2637 - DNA, 26 bp, Unknown
  Description of Unknown: gRNA target site sequence
attccatctgcacgggcacctccagt

SEQ ID NO: 2638 - DNA, 26 bp, Unknown
  Description of Unknown: gRNA target site sequence
agttgagtgtgaccgcatttagtggt

SEQ ID NO: 2639 - DNA, 26 bp, Unknown
  Description of Unknown: gRNA target site sequence
agagtcccgtgtccatggccctcagt

SEQ ID NO: 2640 - DNA, 26 bp, Unknown
  Description of Unknown: gRNA target site sequence
ctgggcataggcaacggaacccagat

SEQ ID NO: 2641 - DNA, 26 bp, Unknown
  Description of Unknown: gRNA target site sequence
agccgtgtaacaaacctggtgtcagt

SEQ ID NO: 2642 - DNA, 26 bp, Unknown
  Description of Unknown: gRNA target site sequence
tgaaggggaaggcaaaacgtcccagt

SEQ ID NO: 2643 - DNA, 26 bp, Unknown
  Description of Unknown: gRNA target site sequence
gcctgacctacgtgtgggtttcagat

SEQ ID NO: 2644 - DNA, 26 bp, Unknown
  Description of Unknown: gRNA target site sequence
gggcatccttaaccatccagtccaat

SEQ ID NO: 2645 - DNA, 26 bp, Unknown
  Description of Unknown: gRNA target site sequence
accaggtttgttacacggcttaaaat

SEQ ID NO: 2646 - DNA, 26 bp, Unknown
  Description of Unknown: gRNA target site sequence
aaggggggagaaaaggccgtggggat

SEQ ID NO: 2647 - DNA, 26 bp, Unknown
  Description of Unknown: gRNA target site sequence
catcgaactggagcttcctagaaggt

SEQ ID NO: 2648 - DNA, 26 bp, Unknown
  Description of Unknown: gRNA target site sequence
cagtgttctgtcaagtcaactcagat

SEQ ID NO: 2649 - DNA, 26 bp, Unknown
  Description of Unknown: gRNA target site sequence
gtcagaatctgggcacggttctggat

SEQ ID NO: 2650 - DNA, 26 bp, Unknown
  Description of Unknown: gRNA target site sequence
cagatgtcccgtgcaagtggcttggt

SEQ ID NO: 2651 - DNA, 26 bp, Unknown
  Description of Unknown: gRNA target site sequence
aattcaaggttttaaggtcctcggat

SEQ ID NO: 2652 - DNA, 26 bp, Unknown
  Description of Unknown: gRNA target site sequence
caattggcatgctgtttaacacaggt

SEQ ID NO: 2653 - DNA, 26 bp, Unknown
  Description of Unknown: gRNA target site sequence
atgctattaaggttgccacccacaat

SEQ ID NO: 2654 - DNA, 26 bp, Unknown
  Description of Unknown: gRNA target site sequence
tgagtcccccatgatccaattccaat

SEQ ID NO: 2655 - DNA, 26 bp, Unknown
  Description of Unknown: gRNA target site sequence
gagtgctaaccatcatgacgtttgat

SEQ ID NO: 2656 - DNA, 26 bp, Unknown
  Description of Unknown: gRNA target site sequence
ccatgtctgatggggatacctttagt

SEQ ID NO: 2657 - DNA, 26 bp, Unknown
  Description of Unknown: gRNA target site sequence
tctgcacgggcacctccagtggaaat

SEQ ID NO: 2658 - DNA, 26 bp, Unknown
  Description of Unknown: gRNA target site sequence
agctgtcaagggaccattagaaggat

SEQ ID NO: 2659 - DNA, 26 bp, Unknown
  Description of Unknown: gRNA target site sequence
tggtggaagggactagtgtctctaat

SEQ ID NO: 2660 - DNA, 26 bp, Unknown
  Description of Unknown: gRNA target site sequence
gagcggtgttcaggtcttcaggaagt

SEQ ID NO: 2661 - DNA, 26 bp, Unknown
  Description of Unknown: gRNA target site sequence
tgagtgtgaccgcatttagtggtgat

SEQ ID NO: 2662 - DNA, 26 bp, Unknown
  Description of Unknown: gRNA target site sequence
agatagctcagaacagagcgccaggt

SEQ ID NO: 2663 - DNA, 26 bp, Unknown
  Description of Unknown: gRNA target site sequence
tcaacctagagaggaagcgacctggt

SEQ ID NO: 2664 - DNA, 26 bp, Unknown
  Description of Unknown: gRNA target site sequence
aaagccactgaggtccgggtgacagt

SEQ ID NO: 2665 - DNA, 26 bp, Unknown
  Description of Unknown: gRNA target site sequence
gcagggccaggtcctggtagccaggt

SEQ ID NO: 2666 - DNA, 26 bp, Unknown
  Description of Unknown: gRNA target site sequence
atgctgctagagaggaccacttggat

SEQ ID NO: 2667 - DNA, 26 bp, Unknown
  Description of Unknown: gRNA target site sequence
attgcatgggtagcccaccaataggt

SEQ ID NO: 2668 - DNA, 26 bp, Unknown
  Description of Unknown: gRNA target site sequence
ctagggctctactccccaacattggt

SEQ ID NO: 2669 - DNA, 26 bp, Unknown
  Description of Unknown: gRNA target site sequence
aaggcaccagagtggcacccagaggt

SEQ ID NO: 2670 - DNA, 26 bp, Unknown
  Description of Unknown: gRNA target site sequence
ttggctaattagctagtagaattgat

SEQ ID NO: 2671 - DNA, 26 bp, Unknown
  Description of Unknown: gRNA target site sequence
ggaagctccagttcgatgggcccaat

SEQ ID NO: 2672 - DNA, 26 bp, Unknown
  Description of Unknown: gRNA target site sequence
ggccctcagtccttggatagtgaggt

SEQ ID NO: 2673 - DNA, 26 bp, Unknown
  Description of Unknown: gRNA target site sequence
tggctttgctcaccaattacataaat

SEQ ID NO: 2674 - DNA, 26 bp, Unknown
  Description of Unknown: gRNA target site sequence
ggttccgttgcctatgcccaggtagt

SEQ ID NO: 2675 - DNA, 26 bp, Unknown
  Description of Unknown: gRNA target site sequence
cagggagcagttgggcggcagcaaat

SEQ ID NO: 2676 - DNA, 26 bp, Unknown
  Description of Unknown: gRNA target site sequence
cagctgccccatgttattgcaacggt

SEQ ID NO: 2677 - DNA, 26 bp, Unknown
  Description of Unknown: gRNA target site sequence
gctgcatccccatattaatcccaagt

SEQ ID NO: 2678 - DNA, 26 bp, Unknown
  Description of Unknown: gRNA target site sequence
ggcaacggaacccagatttatgtaat

SEQ ID NO: 2679 - DNA, 26 bp, Unknown
  Description of Unknown: gRNA target site sequence
ttaacccacgttatatcccaaatagt

SEQ ID NO: 2680 - DNA, 26 bp, Unknown
  Description of Unknown: gRNA target site sequence
attggagactccaccagatactgaat

SEQ ID NO: 2681 - DNA, 26 bp, Unknown
  Description of Unknown: gRNA target site sequence
agctagggacccaatatgtgttgagt

SEQ ID NO: 2682 - DNA, 26 bp, Unknown
  Description of Unknown: gRNA target site sequence
cgaagcactgtcacccggacctcagt

SEQ ID NO: 2683 - DNA, 26 bp, Unknown
  Description of Unknown: gRNA target site sequence
gccatgacaactgtaatgcctgtgat

SEQ ID NO: 2684 - DNA, 26 bp, Unknown
  Description of Unknown: gRNA target site sequence
aatccgaggaccttaaaaccttgaat

SEQ ID NO: 2685 - DNA, 26 bp, Unknown
  Description of Unknown: gRNA target site sequence
tggctctatgcacaatactatcaaat

SEQ ID NO: 2686 - DNA, 26 bp, Unknown
  Description of Unknown: gRNA target site sequence
gaaccgtaggcattggcatttgaggt

SEQ ID NO: 2687 - DNA, 26 bp, Unknown
  Description of Unknown: gRNA target site sequence
catgtttcagggctgttagcttaagt

SEQ ID NO: 2688 - DNA, 26 bp, Unknown
  Description of Unknown: gRNA target site sequence
tagaagtggcttccgtattcctcagt

SEQ ID NO: 2689 - DNA, 26 bp, Unknown
  Description of Unknown: gRNA target site sequence
ccctttgacactttactaacactgat

SEQ ID NO: 2690 - DNA, 26 bp, Unknown
  Description of Unknown: gRNA target site sequence
cctgacaggaggcctgattccataat

SEQ ID NO: 2691 - DNA, 26 bp, Unknown
  Description of Unknown: gRNA target site sequence
ctgctagagaggaccacttggatggt

SEQ ID NO: 2692 - DNA, 26 bp, Unknown
  Description of Unknown: gRNA target site sequence
tattgggtccctagctggttaaaaat

SEQ ID NO: 2693 - DNA, 26 bp, Unknown
  Description of Unknown: gRNA target site sequence
cttacaacaggggtctatgtgaaaat

SEQ ID NO: 2694 - DNA, 26 bp, Unknown
  Description of Unknown: gRNA target site sequence
cgccttccctggcattgttgtagagt

SEQ ID NO: 2695 - DNA, 26 bp, Unknown
  Description of Unknown: gRNA target site sequence
tgtaactaaccaggcccctctccagt

SEQ ID NO: 2696 - DNA, 26 bp, Unknown
  Description of Unknown: gRNA target site sequence
gggaaaggatagccatagtcctgaat

SEQ ID NO: 2697 - DNA, 26 bp, Unknown
  Description of Unknown: gRNA target site sequence
tgcttattgtgggtggcaaccttaat

SEQ ID NO: 2698 - DNA, 26 bp, Unknown
  Description of Unknown: gRNA target site sequence
acattagagcttccaggccttgaggt

SEQ ID NO: 2699 - DNA, 26 bp, Unknown
  Description of Unknown: gRNA target site sequence
attcagtatctggtggagtctccaat

SEQ ID NO: 2700 - DNA, 26 bp, Unknown
  Description of Unknown: gRNA target site sequence
ggtggcagaatggggtgcatgaaggt

SEQ ID NO: 2701 - DNA, 26 bp, Unknown
  Description of Unknown: gRNA target site sequence
atagctccggaactataatgagtggt

SEQ ID NO: 2702 - DNA, 26 bp, Unknown
  Description of Unknown: gRNA target site sequence
catcctctacccaacctgacagagat

SEQ ID NO: 2703 - DNA, 26 bp, Unknown
  Description of Unknown: gRNA target site sequence
catgacgtttgatctgtacttttgat

SEQ ID NO: 2704 - DNA, 26 bp, Unknown
  Description of Unknown: gRNA target site sequence
ataacattcaatgagtcccccatgat

SEQ ID NO: 2705 - DNA, 26 bp, Unknown
  Description of Unknown: gRNA target site sequence
ggccagctcactaagtaggcagaagt

SEQ ID NO: 2706 - DNA, 26 bp, Unknown
  Description of Unknown: gRNA target site sequence
agagggcatctctgataggcagaggt

SEQ ID NO: 2707 - DNA, 26 bp, Unknown
  Description of Unknown: gRNA target site sequence
ctgggttccgttgcctatgcccaggt

SEQ ID NO: 2708 - DNA, 26 bp, Unknown
  Description of Unknown: gRNA target site sequence
ctaaattgcatgggtagcccaccaat

SEQ ID NO: 2709 - DNA, 26 bp, Unknown
  Description of Unknown: gRNA target site sequence
gaagccacagctggtggtatctgagt

SEQ ID NO: 2710 - DNA, 26 bp, Unknown
  Description of Unknown: gRNA target site sequence
ctttgcaccagccattacctgcaagt

SEQ ID NO: 2711 - DNA, 26 bp, Unknown
  Description of Unknown: gRNA target site sequence
cattagaaggatggtgcttcacagat

SEQ ID NO: 2712 - DNA, 26 bp, Unknown
  Description of Unknown: gRNA target site sequence
tggtgtcaggggaagcccacaggagt

SEQ ID NO: 2713 - DNA, 26 bp, Unknown
  Description of Unknown: gRNA target site sequence
taaattgtagtacacgtaatttgggt

SEQ ID NO: 2714 - DNA, 26 bp, Unknown
  Description of Unknown: gRNA target site sequence
aggtatttagtaggggcttcatgaat

SEQ ID NO: 2715 - DNA, 26 bp, Unknown
  Description of Unknown: gRNA target site sequence
gtgggctacccatgcaatttaggggt

SEQ ID NO: 2716 - DNA, 26 bp, Unknown
  Description of Unknown: gRNA target site sequence
gccgaaatgatcttttcaagttaaat

SEQ ID NO: 2717 - DNA, 26 bp, Unknown
  Description of Unknown: gRNA target site sequence
acaggaccctcccaatactggaaagt

SEQ ID NO: 2718 - DNA, 26 bp, Unknown
  Description of Unknown: gRNA target site sequence
atacggaagccacttctaaccataat

SEQ ID NO: 2719 - DNA, 26 bp, Unknown
  Description of Unknown: gRNA target site sequence
tggcgatgcctcggctgctggccagt

SEQ ID NO: 2720 - DNA, 26 bp, Unknown
  Description of Unknown: gRNA target site sequence
gatccttgcagcagttagttcggggt

SEQ ID NO: 2721 - DNA, 26 bp, Unknown
  Description of Unknown: gRNA target site sequence
tcaaccagtaacaggaccctcccaat

SEQ ID NO: 2722 - DNA, 26 bp, Unknown
  Description of Unknown: gRNA target site sequence
agggacgtggttgccaacattggggt

SEQ ID NO: 2723 - DNA, 26 bp, Unknown
  Description of Unknown: gRNA target site sequence
tgagttgacacctgttgcattgcagt

SEQ ID NO: 2724 - DNA, 26 bp, Unknown
  Description of Unknown: gRNA target site sequence
gcaagccatggctttatgggagcggt

SEQ ID NO: 2725 - DNA, 26 bp, Unknown
  Description of Unknown: gRNA target site sequence
accactatttgggatataacgtgggt

SEQ ID NO: 2726 - DNA, 26 bp, Unknown
  Description of Unknown: gRNA target site sequence
gagcgagagccccaacttccccaaat

SEQ ID NO: 2727 - DNA, 26 bp, Unknown
  Description of Unknown: gRNA target site sequence
tccttggatagtgaggttcacttgat

SEQ ID NO: 2728 - DNA, 26 bp, Unknown
  Description of Unknown: gRNA target site sequence
tgggctgtgccattccctaacttaat

SEQ ID NO: 2729 - DNA, 26 bp, Unknown
  Description of Unknown: gRNA target site sequence
gggtacatgagctccaccttgcagat

SEQ ID NO: 2730 - DNA, 26 bp, Unknown
  Description of Unknown: gRNA target site sequence
catctctgtcaggttgggtagaggat

SEQ ID NO: 2731 - DNA, 26 bp, Unknown
  Description of Unknown: gRNA target site sequence
tggcttactccaggagacccacaggt

SEQ ID NO: 2732 - DNA, 26 bp, Unknown
  Description of Unknown: gRNA target site sequence
ttagtggtatcaactggccaaaagat

SEQ ID NO: 2733 - DNA, 26 bp, Unknown
  Description of Unknown: gRNA target site sequence
aaccccgaactaactgctgcaaggat

SEQ ID NO: 2734 - DNA, 26 bp, Unknown
  Description of Unknown: gRNA target site sequence
gtgcttcggcaggctgacagccaggt

SEQ ID NO: 2735 - DNA, 26 bp, Unknown
  Description of Unknown: gRNA target site sequence
aaggatgctcagagggcatctctgat

SEQ ID NO: 2736 - DNA, 26 bp, Unknown
  Description of Unknown: gRNA target site sequence
aacaacatcttccactctacaacaat

SEQ ID NO: 2737 - DNA, 26 bp, Unknown
  Description of Unknown: gRNA target site sequence
cactgtgataactccattgcagtagt

SEQ ID NO: 2738 - DNA, 26 bp, Unknown
  Description of Unknown: gRNA target site sequence
tgcaatgcaacaggtgtcaactcagt

SEQ ID NO: 2739 - DNA, 26 bp, Unknown
  Description of Unknown: gRNA target site sequence
cctggagtacaagggtcctcctaaat

SEQ ID NO: 2740 - DNA, 26 bp, Unknown
  Description of Unknown: gRNA target site sequence
gaatttcccctaccactcattatagt

SEQ ID NO: 2741 - DNA, 26 bp, Unknown
  Description of Unknown: gRNA target site sequence
cttgattgcgtggaattgtgctgagt

SEQ ID NO: 2742 - DNA, 26 bp, Unknown
  Description of Unknown: gRNA target site sequence
gaggcttgcatcaactcaaaaatagt

SEQ ID NO: 2743 - DNA, 26 bp, Unknown
  Description of Unknown: gRNA target site sequence
atgctcctggggaagtagtcccaaat

SEQ ID NO: 2744 - DNA, 26 bp, Unknown
  Description of Unknown: gRNA target site sequence
aggcatcgccagctttgtgtgtgagt

SEQ ID NO: 2745 - DNA, 26 bp, Unknown
  Description of Unknown: gRNA target site sequence
gatgagtgacatcatgcaacacaagt

SEQ ID NO: 2746 - DNA, 26 bp, Unknown
  Description of Unknown: gRNA target site sequence
ggtatgaccttctaggaagctccagt

SEQ ID NO: 2747 - DNA, 26 bp, Unknown
  Description of Unknown: gRNA target site sequence
ttcagggctgttagcttaagtacagt

SEQ ID NO: 2748 - DNA, 26 bp, Unknown
  Description of Unknown: gRNA target site sequence
gggtcctgttactggttgagataaat

SEQ ID NO: 2749 - DNA, 26 bp, Unknown
  Description of Unknown: gRNA target site sequence
cacaataagcaaggctaccatgtggt

SEQ ID NO: 2750 - DNA, 26 bp, Unknown
  Description of Unknown: gRNA target site sequence
cagaaagcctatgataattgatcaat

SEQ ID NO: 2751 - DNA, 26 bp, Unknown
  Description of Unknown: gRNA target site sequence
gcccacccaagtgagcactcaataat

SEQ ID NO: 2752 - DNA, 26 bp, Unknown
  Description of Unknown: gRNA target site sequence
ataattggctaattagctagtagaat

SEQ ID NO: 2753 - DNA, 26 bp, Unknown
  Description of Unknown: gRNA target site sequence
cagcattatgatgtgggtcaaggaat

SEQ ID NO: 2754 - DNA, 26 bp, Unknown
  Description of Unknown: gRNA target site sequence
actggaggtgcccgtgcagatggaat

SEQ ID NO: 2755 - DNA, 26 bp, Unknown
  Description of Unknown: gRNA target site sequence
tatttcttctccagtaaaaattaaat

SEQ ID NO: 2756 - DNA, 26 bp, Unknown
  Description of Unknown: gRNA target site sequence
tggggatgcagcattatgatgtgggt

SEQ ID NO: 2757 - DNA, 26 bp, Unknown
  Description of Unknown: gRNA target site sequence
tcataatgctgcatccccatattaat

SEQ ID NO: 2758 - DNA, 26 bp, Unknown
  Description of Unknown: gRNA target site sequence
agtcaagcaaactggataacagggat

SEQ ID NO: 2759 - DNA, 26 bp, Unknown
  Description of Unknown: gRNA target site sequence
ctgagcccttgggctaatggcaggat

SEQ ID NO: 2760 - DNA, 26 bp, Unknown
  Description of Unknown: gRNA target site sequence
atccaattccaatctatcactctggt

SEQ ID NO: 2761 - DNA, 26 bp, Unknown
  Description of Unknown: gRNA target site sequence
cctacgtgtgggtttcagatgcagat

SEQ ID NO: 2762 - DNA, 26 bp, Unknown
  Description of Unknown: gRNA target site sequence
catgacacctatccctgttatccagt

SEQ ID NO: 2763 - DNA, 26 bp, Unknown
  Description of Unknown: gRNA target site sequence
attcaatgagtcccccatgatccaat

SEQ ID NO: 2764 - DNA, 26 bp, Unknown
  Description of Unknown: gRNA target site sequence
agagaggcttgcatcaactcaaaaat

SEQ ID NO: 2765 - DNA, 26 bp, Unknown
  Description of Unknown: gRNA target site sequence
tggcttccgtattcctcagtagtaat

SEQ ID NO: 2766 - DNA, 26 bp, Unknown
  Description of Unknown: gRNA target site sequence
aggtttgttacacggcttaaaatgat

SEQ ID NO: 2767 - DNA, 26 bp, Unknown
  Description of Unknown: gRNA target site sequence
aaaacatacgtggctctatgcacaat

SEQ ID NO: 2768 - DNA, 26 bp, Unknown
  Description of Unknown: gRNA target site sequence
gtggcacccagaggtgacttccaggt

SEQ ID NO: 2769 - DNA, 26 bp, Unknown
  Description of Unknown: gRNA target site sequence
ccaggccttgaggtccacccctaaat

SEQ ID NO: 2770 - DNA, 26 bp, Unknown
  Description of Unknown: gRNA target site sequence
gtctagctagctagagctgctggaat

SEQ ID NO: 2771 - DNA, 26 bp, Unknown
  Description of Unknown: gRNA target site sequence
tccagtctcatagaagggtctgaaat

SEQ ID NO: 2772 - DNA, 26 bp, Unknown
  Description of Unknown: gRNA target site sequence
aatctgtggtggtcgttttccggagt

SEQ ID NO: 2773 - DNA, 26 bp, Unknown
  Description of Unknown: gRNA target site sequence
ccaagtctccacttagttatccagat

SEQ ID NO: 2774 - DNA, 26 bp, Unknown
  Description of Unknown: gRNA target site sequence
gggagggtcctgttactggttgagat

SEQ ID NO: 2775 - DNA, 26 bp, Unknown
  Description of Unknown: gRNA target site sequence
taggggcttcatgaatgcatgtgagt

SEQ ID NO: 2776 - DNA, 26 bp, Unknown
  Description of Unknown: gRNA target site sequence
cacagctactcctgggtgacagaggt

SEQ ID NO: 2777 - DNA, 26 bp, Unknown
  Description of Unknown: gRNA target site sequence
taaagagagatgaattccccccaaat

SEQ ID NO: 2778 - DNA, 26 bp, Unknown
  Description of Unknown: gRNA target site sequence
cttctgggcatccttaaccatccagt

SEQ ID NO: 2779 - DNA, 26 bp, Unknown
  Description of Unknown: gRNA target site sequence
gcaggatttgtctaggcatcattaat

SEQ ID NO: 2780 - DNA, 26 bp, Unknown
  Description of Unknown: gRNA target site sequence
caacacatattgggtccctagctggt

SEQ ID NO: 2781 - DNA, 26 bp, Unknown
  Description of Unknown: gRNA target site sequence
tatatcccaaatagtggtgaagaaat

SEQ ID NO: 2782 - DNA, 26 bp, Unknown
  Description of Unknown: gRNA target site sequence
tgggatcaaagctatctatataaagt

SEQ ID NO: 2783 - DNA, 26 bp, Unknown
  Description of Unknown: gRNA target site sequence
ggaatgagttgaccttcctagatgat

SEQ ID NO: 2784 - DNA, 26 bp, Unknown
  Description of Unknown: gRNA target site sequence
tggcaaagctggccttaggcagaggt

SEQ ID NO: 2785 - DNA, 26 bp, Unknown
  Description of Unknown: gRNA target site sequence
acacgtaggtcaggcaacaattaagt

SEQ ID NO: 2786 - DNA, 26 bp, Unknown
  Description of Unknown: gRNA target site sequence
tactaacactgatcgcaaaaacaaat

SEQ ID NO: 2787 - DNA, 26 bp, Unknown
  Description of Unknown: gRNA target site sequence
tagcactgtgataactccattgcagt

SEQ ID NO: 2788 - DNA, 26 bp, Unknown
  Description of Unknown: gRNA target site sequence
tcacccaggagtagctgtgtcttgat

SEQ ID NO: 2789 - DNA, 26 bp, Unknown
  Description of Unknown: gRNA target site sequence
tcagacccttctatgagactggaagt

SEQ ID NO: 2790 - DNA, 26 bp, Unknown
  Description of Unknown: gRNA target site sequence
gggcttttacaccagttcctttcaat

SEQ ID NO: 2791 - DNA, 26 bp, Unknown
  Description of Unknown: gRNA target site sequence
agtagttttggagttgtcaatgaaat

SEQ ID NO: 2792 - DNA, 26 bp, Unknown
  Description of Unknown: gRNA target site sequence
attggatcatgggggactcattgaat

SEQ ID NO: 2793 - DNA, 26 bp, Unknown
  Description of Unknown: gRNA target site sequence
aaccctcacctctgcctatcagagat

SEQ ID NO: 2794 - DNA, 26 bp, Unknown
  Description of Unknown: gRNA target site sequence
tccagtttccaagctagttagcaaat

SEQ ID NO: 2795 - DNA, 26 bp, Unknown
  Description of Unknown: gRNA target site sequence
gtcccttgacagctttacaaataagt

SEQ ID NO: 2796 - DNA, 26 bp, Unknown
  Description of Unknown: gRNA target site sequence
aggaggacccttgtactccaggaaat

SEQ ID NO: 2797 - DNA, 26 bp, Unknown
  Description of Unknown: gRNA target site sequence
actcaactttccagtattgggagggt

SEQ ID NO: 2798 - DNA, 26 bp, Unknown
  Description of Unknown: gRNA target site sequence
atagcccacccaagtgagcactcaat

SEQ ID NO: 2799 - DNA, 26 bp, Unknown
  Description of Unknown: gRNA target site sequence
tcctctggatccttgcagcagttagt

SEQ ID NO: 2800 - DNA, 26 bp, Unknown
  Description of Unknown: gRNA target site sequence
aatgcggtcacactcaactttccagt

SEQ ID NO: 2801 - DNA, 26 bp, Unknown
  Description of Unknown: gRNA target site sequence
agtattgggagggtcctgttactggt

SEQ ID NO: 2802 - DNA, 26 bp, Unknown
  Description of Unknown: gRNA target site sequence
tgaggagatatgattagctcacaaat

SEQ ID NO: 2803 - DNA, 26 bp, Unknown
  Description of Unknown: gRNA target site sequence
gtgggtttcagatgcagatcctcagt

SEQ ID NO: 2804 - DNA, 26 bp, Unknown
  Description of Unknown: gRNA target site sequence
ctaaaggtatccccatcagacatggt

SEQ ID NO: 2805 - DNA, 26 bp, Unknown
  Description of Unknown: gRNA target site sequence
gggtccctagctggttaaaaatgaat

SEQ ID NO: 2806 - DNA, 26 bp, Unknown
  Description of Unknown: gRNA target site sequence
ttggggggaattcatctctctttaat

SEQ ID NO: 2807 - DNA, 26 bp, Unknown
  Description of Unknown: gRNA target site sequence
cctggcattgttgtagagtggaagat

SEQ ID NO: 2808 - DNA, 26 bp, Unknown
  Description of Unknown: gRNA target site sequence
tatggcagtgtctttccaccttgggt

SEQ ID NO: 2809 - DNA, 26 bp, Unknown
  Description of Unknown: gRNA target site sequence
aagtggcttccgtattcctcagtagt

SEQ ID NO: 2810 - DNA, 26 bp, Unknown
  Description of Unknown: gRNA target site sequence
ctgtgaagcaccatccttctaatggt

SEQ ID NO: 2811 - DNA, 26 bp, Unknown
  Description of Unknown: gRNA target site sequence
acgggcacctccagtggaaatcaagt

SEQ ID NO: 2812 - DNA, 26 bp, Unknown
  Description of Unknown: gRNA target site sequence
tgtgtcctagaaattcagaccagagt

SEQ ID NO: 2813 - DNA, 26 bp, Unknown
  Description of Unknown: gRNA target site sequence
gaactataatgagtggtaggggaaat

SEQ ID NO: 2814 - DNA, 26 bp, Unknown
  Description of Unknown: gRNA target site sequence
aagtacagatcaaacgtcatgatggt

SEQ ID NO: 2815 - DNA, 26 bp, Unknown
  Description of Unknown: gRNA target site sequence
ctacatggtttcttaaccaagaaggt

SEQ ID NO: 2816 - DNA, 26 bp, Unknown
  Description of Unknown: gRNA target site sequence
attgcgtggaattgtgctgagttggt

SEQ ID NO: 2817 - DNA, 26 bp, Unknown
  Description of Unknown: gRNA target site sequence
tatatagctccggaactataatgagt

SEQ ID NO: 2818 - DNA, 26 bp, Unknown
  Description of Unknown: gRNA target site sequence
tatggaatcaggcctcctgtcaggat

SEQ ID NO: 2819 - DNA, 26 bp, Unknown
  Description of Unknown: gRNA target site sequence
aaagaggatggataccttccaagaat

SEQ ID NO: 2820 - DNA, 26 bp, Unknown
  Description of Unknown: gRNA target site sequence
caagcctctctgtatggagagctggt

SEQ ID NO: 2821 - DNA, 26 bp, Unknown
  Description of Unknown: gRNA target site sequence
ggtcatacctgtgggtctcctggagt

SEQ ID NO: 2822 - DNA, 26 bp, Unknown
  Description of Unknown: gRNA target site sequence
aggggcctggttagttacaggaaggt

SEQ ID NO: 2823 - DNA, 26 bp, Unknown
  Description of Unknown: gRNA target site sequence
tggggaatgagttgaccttcctagat

SEQ ID NO: 2824 - DNA, 26 bp, Unknown
  Description of Unknown: gRNA target site sequence
agggctcagaaagttagcagcctagt

SEQ ID NO: 2825 - DNA, 26 bp, Unknown
  Description of Unknown: gRNA target site sequence
cttcctagaaggtcatacctgtgggt

SEQ ID NO: 2826 - DNA, 26 bp, Unknown
  Description of Unknown: gRNA target site sequence
agaacacccagaaagcctatgataat

SEQ ID NO: 2827 - DNA, 26 bp, Unknown
  Description of Unknown: gRNA target site sequence
aaaagaagccctcttacaacaggggt

SEQ ID NO: 2828 - DNA, 26 bp, Unknown
  Description of Unknown: gRNA target site sequence
ccttaatagcattctgactgtaaaat

SEQ ID NO: 2829 - DNA, 26 bp, Unknown
  Description of Unknown: gRNA target site sequence
gtattctaaggttatgatagaatgat

SEQ ID NO: 2830 - DNA, 26 bp, Unknown
  Description of Unknown: gRNA target site sequence
tcagaacagagcgccaggtatttagt

SEQ ID NO: 2831 - DNA, 26 bp, Unknown
  Description of Unknown: gRNA target site sequence
acccacgttatatcccaaatagtggt

SEQ ID NO: 2832 - DNA, 26 bp, Unknown
  Description of Unknown: gRNA target site sequence
gaactcttaaagagaatgtccacagt

SEQ ID NO: 2833 - DNA, 26 bp, Unknown
  Description of Unknown: gRNA target site sequence
atacgtaaatataaggtgtgtacaat

SEQ ID NO: 2834 - DNA, 26 bp, Unknown
  Description of Unknown: gRNA target site sequence
agttagcagcctagtagttttggagt

SEQ ID NO: 2835 - DNA, 26 bp, Unknown
  Description of Unknown: gRNA target site sequence
gccctgaacctctgtcacccaggagt

SEQ ID NO: 2836 - DNA, 26 bp, Unknown
  Description of Unknown: gRNA target site sequence
ccctttggcttttccatgctagcaat

SEQ ID NO: 2837 - DNA, 26 bp, Unknown
  Description of Unknown: gRNA target site sequence
caatgaaatgaattggactggatggt

SEQ ID NO: 2838 - DNA, 26 bp, Unknown
  Description of Unknown: gRNA target site sequence
tctagcagcattctgcccagcctaat

SEQ ID NO: 2839 - DNA, 26 bp, Unknown
  Description of Unknown: gRNA target site sequence
gacacgggactctacatctgcaaggt

SEQ ID NO: 2840 - DNA, 26 bp, Unknown
  Description of Unknown: gRNA target site sequence
cctcaaagtgaacatgaagcttcagt

SEQ ID NO: 2841 - DNA, 26 bp, Unknown
  Description of Unknown: gRNA target site sequence
ctggtggagtctccaatattagaaat

SEQ ID NO: 2842 - DNA, 26 bp, Unknown
  Description of Unknown: gRNA target site sequence
tcagtgaaatggctttgctcaccaat

SEQ ID NO: 2843 - DNA, 26 bp, Unknown
  Description of Unknown: gRNA target site sequence
tctgtcacatcagctccactttcagt

SEQ ID NO: 2844 - DNA, 26 bp, Unknown
  Description of Unknown: gRNA target site sequence
gagtgagacttttggagcatgaagat

SEQ ID NO: 2845 - DNA, 26 bp, Unknown
  Description of Unknown: gRNA target site sequence
gacccttctatgagactggaagtgat

SEQ ID NO: 2846 - DNA, 26 bp, Unknown
  Description of Unknown: gRNA target site sequence
tggggtgcatgaaggtttctgaaaat

SEQ ID NO: 2847 - DNA, 26 bp, Unknown
  Description of Unknown: gRNA target site sequence
agggactagtgtctctaatatagggt

SEQ ID NO: 2848 - DNA, 26 bp, Unknown
  Description of Unknown: gRNA target site sequence
tatctgtgaagcaccatccttctaat

SEQ ID NO: 2849 - DNA, 26 bp, Unknown
  Description of Unknown: gRNA target site sequence
gtgcagatggaatcatctaggaaggt

SEQ ID NO: 2850 - DNA, 26 bp, Unknown
  Description of Unknown: gRNA target site sequence
attttaagccgtgtaacaaacctggt

SEQ ID NO: 2851 - DNA, 26 bp, Unknown
  Description of Unknown: gRNA target site sequence
agattctgtacctcaaccttcagaat

SEQ ID NO: 2852 - DNA, 26 bp, Unknown
  Description of Unknown: gRNA target site sequence
tcaaaaatagtggctgcatgccaaat

SEQ ID NO: 2853 - DNA, 26 bp, Unknown
  Description of Unknown: gRNA target site sequence
ttgttacacggcttaaaatgatgagt

SEQ ID NO: 2854 - DNA, 26 bp, Unknown
  Description of Unknown: gRNA target site sequence
ctcacaggagttcatgaaccacaagt

SEQ ID NO: 2855 - DNA, 26 bp, Unknown
  Description of Unknown: gRNA target site sequence
aagtcacctctgggtgccactctggt

SEQ ID NO: 2856 - DNA, 26 bp, Unknown
  Description of Unknown: gRNA target site sequence
ctaactttctgagcccttgggctaat

SEQ ID NO: 2857 - DNA, 26 bp, Unknown
  Description of Unknown: gRNA target site sequence
ttaatatggggatgcagcattatgat

SEQ ID NO: 2858 - DNA, 26 bp, Unknown
  Description of Unknown: gRNA target site sequence
aagccacagagccgagggcaccaggt

SEQ ID NO: 2859 - DNA, 26 bp, Unknown
  Description of Unknown: gRNA target site sequence
tgacttaagcaaatcctgggaagagt

SEQ ID NO: 2860 - DNA, 26 bp, Unknown
  Description of Unknown: gRNA target site sequence
atgcattcatgaagcccctactaaat

SEQ ID NO: 2861 - DNA, 26 bp, Unknown
  Description of Unknown: gRNA target site sequence
tctcttaatcaattctactagctaat

SEQ ID NO: 2862 - DNA, 26 bp, Unknown
  Description of Unknown: gRNA target site sequence
atgtcctttgctgtaggttcagcagt

SEQ ID NO: 2863 - DNA, 26 bp, Unknown
  Description of Unknown: gRNA target site sequence
agccaccagtctgtttggcatacaat

SEQ ID NO: 2864 - DNA, 26 bp, Unknown
  Description of Unknown: gRNA target site sequence
aaactcttcccaggatttgcttaagt

SEQ ID NO: 2865 - DNA, 26 bp, Unknown
  Description of Unknown: gRNA target site sequence
cactttgaggatctggataactaagt

SEQ ID NO: 2866 - DNA, 26 bp, Unknown
  Description of Unknown: gRNA target site sequence
tcagactgactggagaggggcctggt

SEQ ID NO: 2867 - DNA, 26 bp, Unknown
  Description of Unknown: gRNA target site sequence
caatgccagggaaggcggaggctggt

SEQ ID NO: 2868 - DNA, 26 bp, Unknown
  Description of Unknown: gRNA target site sequence
tttgtggaggagctcaggacactaat

SEQ ID NO: 2869 - DNA, 26 bp, Unknown
  Description of Unknown: gRNA target site sequence
gtgtccatggccctcagtccttggat

SEQ ID NO: 2870 - DNA, 26 bp, Unknown
  Description of Unknown: gRNA target site sequence
atattagtcattctgaaacctcaaat

SEQ ID NO: 2871 - DNA, 26 bp, Unknown
  Description of Unknown: gRNA target site sequence
aactactgcaatggagttatcacagt

SEQ ID NO: 2872 - DNA, 26 bp, Unknown
  Description of Unknown: gRNA target site sequence
ggccaaaagatgatgttgagtttagt

SEQ ID NO: 2873 - DNA, 26 bp, Unknown
  Description of Unknown: gRNA target site sequence
aattccccccaaatgcacaaacaaat

SEQ ID NO: 2874 - DNA, 26 bp, Unknown
  Description of Unknown: gRNA target site sequence
caagcactgctatgacctcatccagt

SEQ ID NO: 2875 - DNA, 26 bp, Unknown
  Description of Unknown: gRNA target site sequence
tatgattacatcaaggcttcaaaaat

SEQ ID NO: 2876 - DNA, 26 bp, Unknown
  Description of Unknown: gRNA target site sequence
tgatatgttctctggtattctaaggt

SEQ ID NO: 2877 - DNA, 26 bp, Unknown
  Description of Unknown: gRNA target site sequence
cacatggctatgttttagccagtgat

SEQ ID NO: 2878 - DNA, 26 bp, Unknown
  Description of Unknown: gRNA target site sequence
gcccctctccagtcagtctgacaagt

SEQ ID NO: 2879 - DNA, 26 bp, Unknown
  Description of Unknown: gRNA target site sequence
ccataaagccatggcttgccttggat

SEQ ID NO: 2880 - DNA, 26 bp, Unknown
  Description of Unknown: gRNA target site sequence
ggcaccaggtcgcttcctctctaggt

SEQ ID NO: 2881 - DNA, 26 bp, Unknown
  Description of Unknown: gRNA target site sequence
cctggctctaccatgaaatatgtgat

SEQ ID NO: 2882 - DNA, 26 bp, Unknown
  Description of Unknown: gRNA target site sequence
tcctcggattcatatactttataaat

SEQ ID NO: 2883 - DNA, 26 bp, Unknown
  Description of Unknown: gRNA target site sequence
acatgtcaacaccaactcagcacaat

SEQ ID NO: 2884 - DNA, 26 bp, Unknown
  Description of Unknown: gRNA target site sequence
gcacccagaggtgacttccaggtgat

SEQ ID NO: 2885 - DNA, 26 bp, Unknown
  Description of Unknown: gRNA target site sequence
cttgcaaaccattgaaaggaactggt

SEQ ID NO: 2886 - DNA, 26 bp, Unknown
  Description of Unknown: gRNA target site sequence
cacaaaacttccctgggacccaaggt

SEQ ID NO: 2887 - DNA, 26 bp, Unknown
  Description of Unknown: gRNA target site sequence
attggggttgccatgacaactgtaat

SEQ ID NO: 2888 - DNA, 26 bp, Unknown
  Description of Unknown: gRNA target site sequence
gactctaagcttaagaaatcctaaat

SEQ ID NO: 2889 - DNA, 26 bp, Unknown
  Description of Unknown: gRNA target site sequence
tccatggccctcagtccttggatagt

SEQ ID NO: 2890 - DNA, 26 bp, Unknown
  Description of Unknown: gRNA target site sequence
cttgttcccttgcagacaagattgat

SEQ ID NO: 2891 - DNA, 26 bp, Unknown
  Description of Unknown: gRNA target site sequence
cacttagttatccagatcctcaaagt

SEQ ID NO: 2892 - DNA, 26 bp, Unknown
  Description of Unknown: gRNA target site sequence
ttgtagagtggaagatgttgttagat

SEQ ID NO: 2893 - DNA, 26 bp, Unknown
  Description of Unknown: gRNA target site sequence
tatttgtttttgcgatcagtgttagt

SEQ ID NO: 2894 - DNA, 26 bp, Unknown
  Description of Unknown: gRNA target site sequence
tcacactcatcaccactaaatgcggt

SEQ ID NO: 2895 - DNA, 26 bp, Unknown
  Description of Unknown: gRNA target site sequence
ttgattcattcagtatctggtggagt

SEQ ID NO: 2896 - DNA, 26 bp, Unknown
  Description of Unknown: gRNA target site sequence
gagcagtgattatagcccacccaagt

SEQ ID NO: 2897 - DNA, 26 bp, Unknown
  Description of Unknown: gRNA target site sequence
gactagtgtctctaatatagggtgat

SEQ ID NO: 2898 - DNA, 26 bp, Unknown
  Description of Unknown: gRNA target site sequence
ttgtattgactctaagcttaagaaat

SEQ ID NO: 2899 - DNA, 26 bp, Unknown
  Description of Unknown: gRNA target site sequence
catttttaaccagctagggacccaat

SEQ ID NO: 2900 - DNA, 26 bp, Unknown
  Description of Unknown: gRNA target site sequence
acggaacccagatttatgtaattggt

SEQ ID NO: 2901 - DNA, 26 bp, Unknown
  Description of Unknown: gRNA target site sequence
ctaccaccaataccaacacctgtgat

SEQ ID NO: 2902 - DNA, 26 bp, Unknown
  Description of Unknown: gRNA target site sequence
aaagcaggcggtaagaaaggggaggt

SEQ ID NO: 2903 - DNA, 26 bp, Unknown
  Description of Unknown: gRNA target site sequence
ccttgtgttctacctggtgtattagt

SEQ ID NO: 2904 - DNA, 26 bp, Unknown
  Description of Unknown: gRNA target site sequence
cttctgagcagggtttcaatttgagt

SEQ ID NO: 2905 - DNA, 26 bp, Unknown
  Description of Unknown: gRNA target site sequence
taagcaggaaagtgtgtcctagaaat

SEQ ID NO: 2906 - DNA, 26 bp, Unknown
  Description of Unknown: gRNA target site sequence
cttgtctgcaagggaacaagcttgat

SEQ ID NO: 2907 - DNA, 26 bp, Unknown
  Description of Unknown: gRNA target site sequence
atgacaactgtaatgcctgtgatagt

SEQ ID NO: 2908 - DNA, 26 bp, Unknown
  Description of Unknown: gRNA target site sequence
gaacctgtgttaaacagcatgccaat

SEQ ID NO: 2909 - DNA, 26 bp, Unknown
  Description of Unknown: gRNA target site sequence
atgtgctttggggcttttacaccagt

SEQ ID NO: 2910 - DNA, 26 bp, Unknown
  Description of Unknown: gRNA target site sequence
aaacgtcccagtcaagcaaactggat

SEQ ID NO: 2911 - DNA, 26 bp, Unknown
  Description of Unknown: gRNA target site sequence
ccttccaagaatgacttgcaggtaat

SEQ ID NO: 2912 - DNA, 26 bp, Unknown
  Description of Unknown: gRNA target site sequence
tcaggttgggtagaggatgttggaat

SEQ ID NO: 2913 - DNA, 26 bp, Unknown
  Description of Unknown: gRNA target site sequence
taggatttcttaagcttagagtcaat

SEQ ID NO: 2914 - DNA, 26 bp, Unknown
  Description of Unknown: gRNA target site sequence
ggcaacctacatgatggggaatgagt

SEQ ID NO: 2915 - DNA, 26 bp, Unknown
  Description of Unknown: gRNA target site sequence
aatgaattagccagcttgtttaaaat

SEQ ID NO: 2916 - DNA, 26 bp, Unknown
  Description of Unknown: gRNA target site sequence
accaactcagcacaattccacgcaat

SEQ ID NO: 2917 - DNA, 26 bp, Unknown
  Description of Unknown: gRNA target site sequence
tggatggttaaggatgcccagaagat

SEQ ID NO: 2918 - DNA, 26 bp, Unknown
  Description of Unknown: gRNA target site sequence
ctgcaagggaacaagcttgataagat

SEQ ID NO: 2919 - DNA, 26 bp, Unknown
  Description of Unknown: gRNA target site sequence
caggagcatcatatcatatcaaaagt

SEQ ID NO: 2920 - DNA, 26 bp, Unknown
  Description of Unknown: gRNA target site sequence
tttaagagggaaaggatagccatagt

SEQ ID NO: 2921 - DNA, 26 bp, Unknown
  Description of Unknown: gRNA target site sequence
ataattctacctcttctaccaccaat

SEQ ID NO: 2922 - DNA, 26 bp, Unknown
  Description of Unknown: gRNA target site sequence
agtcctaaaagtaaacctcctgaaat

SEQ ID NO: 2923 - DNA, 26 bp, Unknown
  Description of Unknown: gRNA target site sequence
tggatgaggtcatagcagtgcttgat

SEQ ID NO: 2924 - DNA, 26 bp, Unknown
  Description of Unknown: gRNA target site sequence
agctcatcctgaaacccagctcaaat

SEQ ID NO: 2925 - DNA, 26 bp, Unknown
  Description of Unknown: gRNA target site sequence
ttacctgcaagtcattcttggaaggt

SEQ ID NO: 2926 - DNA, 26 bp, Unknown
  Description of Unknown: gRNA target site sequence
tgctcagaagcacatgaacattcaat

SEQ ID NO: 2927 - DNA, 26 bp, Unknown
  Description of Unknown: gRNA target site sequence
cagtgatttatagcaaagccagaagt

SEQ ID NO: 2928 - DNA, 26 bp, Unknown
  Description of Unknown: gRNA target site sequence
gttttccagctactctccataaagat

SEQ ID NO: 2929 - DNA, 26 bp, Unknown
  Description of Unknown: gRNA target site sequence
ttctaatattggagactccaccagat

SEQ ID NO: 2930 - DNA, 26 bp, Unknown
  Description of Unknown: gRNA target site sequence
agagctgctggaatagacatgacaat

SEQ ID NO: 2931 - DNA, 26 bp, Unknown
  Description of Unknown: gRNA target site sequence
tacctacttcatacaaactacatggt

SEQ ID NO: 2932 - DNA, 26 bp, Unknown
  Description of Unknown: gRNA target site sequence
cttatctctctctagaccttcttggt

SEQ ID NO: 2933 - DNA, 26 bp, Unknown
  Description of Unknown: gRNA target site sequence
gggcttggccatgaaggagcatgagt

SEQ ID NO: 2934 - DNA, 26 bp, Unknown
  Description of Unknown: gRNA target site sequence
agtcccaaatagccaaacctattggt

SEQ ID NO: 2935 - DNA, 26 bp, Unknown
  Description of Unknown: gRNA target site sequence
gaaggatggtgcttcacagatagaat

SEQ ID NO: 2936 - DNA, 26 bp, Unknown
  Description of Unknown: gRNA target site sequence
atatgatatgatgctcctggggaagt

SEQ ID NO: 2937 - DNA, 26 bp, Unknown
  Description of Unknown: gRNA target site sequence
tcaacatcatcttttggccagttgat

SEQ ID NO: 2938 - DNA, 26 bp, Unknown
  Description of Unknown: gRNA target site sequence
ccaattcttacaaacatgtggttaat

SEQ ID NO: 2939 - DNA, 26 bp, Unknown
  Description of Unknown: gRNA target site sequence
tttcaatttccaagagctgaggcaat

SEQ ID NO: 2940 - DNA, 26 bp, Unknown
  Description of Unknown: gRNA target site sequence
ctgggtttcaggatgagctcacaagt

SEQ ID NO: 2941 - DNA, 26 bp, Unknown
  Description of Unknown: gRNA target site sequence
catttttttcacatatagtaagagat

SEQ ID NO: 2942 - DNA, 26 bp, Unknown
  Description of Unknown: gRNA target site sequence
taaagtgtcaaagggattgagcagat

SEQ ID NO: 2943 - DNA, 26 bp, Unknown
  Description of Unknown: gRNA target site sequence
aatcacttccagtctcatagaagggt

SEQ ID NO: 2944 - DNA, 26 bp, Unknown
  Description of Unknown: gRNA target site sequence
ttaaccaagaaggtctagagagagat

SEQ ID NO: 2945 - DNA, 26 bp, Unknown
  Description of Unknown: gRNA target site sequence
gatcaattatcataggctttctgggt

SEQ ID NO: 2946 - DNA, 26 bp, Unknown
  Description of Unknown: gRNA target site sequence
aatcaccctatattagagacactagt

SEQ ID NO: 2947 - DNA, 26 bp, Unknown
  Description of Unknown: gRNA target site sequence
aaacgtctcatacgtaaatataaggt

SEQ ID NO: 2948 - DNA, 26 bp, Unknown
  Description of Unknown: gRNA target site sequence
cacccagaaagcctatgataattgat

SEQ ID NO: 2949 - DNA, 26 bp, Unknown
  Description of Unknown: gRNA target site sequence
cacagacatagcagtcctttataaat

SEQ ID NO: 2950 - DNA, 26 bp, Unknown
  Description of Unknown: gRNA target site sequence
cagctcttcagagactgacaccaggt

SEQ ID NO: 2951 - DNA, 26 bp, Unknown
  Description of Unknown: gRNA target site sequence
tttgctgtaggttcagcagtggggat

SEQ ID NO: 2952 - DNA, 26 bp, Unknown
  Description of Unknown: gRNA target site sequence
gattttcttgattcagctattaaaat

SEQ ID NO: 2953 - DNA, 26 bp, Unknown
  Description of Unknown: gRNA target site sequence
acatggtagccttgcttattgtgggt

SEQ ID NO: 2954 - DNA, 26 bp, Unknown
  Description of Unknown: gRNA target site sequence
accacgtcccttgcagccattttgat

SEQ ID NO: 2955 - DNA, 26 bp, Unknown
  Description of Unknown: gRNA target site sequence
gagactccaccagatactgaatgaat

SEQ ID NO: 2956 - DNA, 26 bp, Unknown
  Description of Unknown: gRNA target site sequence
aaacctcaaatgccaatgcctacggt

SEQ ID NO: 2957 - DNA, 26 bp, Unknown
  Description of Unknown: gRNA target site sequence
gtgaacatgaagcttcagtttcaaat

SEQ ID NO: 2958 - DNA, 26 bp, Unknown
  Description of Unknown: gRNA target site sequence
cttgtactccaggaaattctccaagt

SEQ ID NO: 2959 - DNA, 26 bp, Unknown
  Description of Unknown: gRNA target site sequence
tttggccagttgataccactaaaggt

SEQ ID NO: 2960 - DNA, 26 bp, Unknown
  Description of Unknown: gRNA target site sequence
ctatcattctatcataaccttagaat

SEQ ID NO: 2961 - DNA, 26 bp, Unknown
  Description of Unknown: gRNA target site sequence
aaggactttatatagatagctttgat

SEQ ID NO: 2962 - DNA, 26 bp, Unknown
  Description of Unknown: gRNA target site sequence
gagtaagccattgtcttcaagacagt

SEQ ID NO: 2963 - DNA, 26 bp, Unknown
  Description of Unknown: gRNA target site sequence
tgtcaagggaccattagaaggatggt

SEQ ID NO: 2964 - DNA, 26 bp, Unknown
  Description of Unknown: gRNA target site sequence
gtttttgcgatcagtgttagtaaagt

SEQ ID NO: 2965 - DNA, 26 bp, Unknown
  Description of Unknown: gRNA target site sequence
caagcttgttcccttgcagacaagat

SEQ ID NO: 2966 - DNA, 26 bp, Unknown
  Description of Unknown: gRNA target site sequence
attgaatacattttccatccatggat

SEQ ID NO: 2967 - DNA, 26 bp, Unknown
  Description of Unknown: gRNA target site sequence
ctttcaggatcctgaagctttgaaat

SEQ ID NO: 2968 - DNA, 26 bp, Unknown
  Description of Unknown: gRNA target site sequence
agaatgacttgcaggtaatggctggt

SEQ ID NO: 2969 - DNA, 26 bp, Unknown
  Description of Unknown: gRNA target site sequence
ggacctcaaggcctggaagctctaat

SEQ ID NO: 2970 - DNA, 26 bp, Unknown
  Description of Unknown: gRNA target site sequence
aatggtcccttgacagctttacaaat

SEQ ID NO: 2971 - DNA, 26 bp, Unknown
  Description of Unknown: gRNA target site sequence
gaccttctaggaagctccagttcgat

SEQ ID NO: 2972 - DNA, 26 bp, Unknown
  Description of Unknown: gRNA target site sequence
ttgctttaaattgtagtacacgtaat

SEQ ID NO: 2973 - DNA, 26 bp, Unknown
  Description of Unknown: gRNA target site sequence
gtcctagaaattcagaccagagtgat

SEQ ID NO: 2974 - DNA, 26 bp, Unknown
  Description of Unknown: gRNA target site sequence
tggagaatttcctggagtacaagggt

SEQ ID NO: 2975 - DNA, 26 bp, Unknown
  Description of Unknown: gRNA target site sequence
aagcaaactggataacagggataggt

SEQ ID NO: 2976 - DNA, 26 bp, Unknown
  Description of Unknown: gRNA target site sequence
ctttcagtgaaagcatcacttgggat

SEQ ID NO: 2977 - DNA, 26 bp, Unknown
  Description of Unknown: gRNA target site sequence
gctgaatcaagaaaatctcctgaggt

SEQ ID NO: 2978 - DNA, 26 bp, Unknown
  Description of Unknown: gRNA target site sequence
ttccaatctatcactctggtctgaat

SEQ ID NO: 2979 - DNA, 26 bp, Unknown
  Description of Unknown: gRNA target site sequence
atgaagaagagagtccatatttcaat

SEQ ID NO: 2980 - DNA, 26 bp, Unknown
  Description of Unknown: gRNA target site sequence
atgtcaaaaacttctgcctacttagt

SEQ ID NO: 2981 - DNA, 26 bp, Unknown
  Description of Unknown: gRNA target site sequence
actggctaaaacatagccatgtgagt

SEQ ID NO: 2982 - DNA, 26 bp, Unknown
  Description of Unknown: gRNA target site sequence
gcaatcatttgccttgaatggaagat

SEQ ID NO: 2983 - DNA, 26 bp, Unknown
  Description of Unknown: gRNA target site sequence
catgaaggagcatgagttcactgagt

SEQ ID NO: 2984 - DNA, 26 bp, Unknown
  Description of Unknown: gRNA target site sequence
ccatcacctggaagtcacctctgggt

SEQ ID NO: 2985 - DNA, 26 bp, Unknown
  Description of Unknown: gRNA target site sequence
gcaaatgaccttgtgttctacctggt

SEQ ID NO: 2986 - DNA, 26 bp, Unknown
  Description of Unknown: gRNA target site sequence
tcacatatttcatggtagagccaggt

SEQ ID NO: 2987 - DNA, 26 bp, Unknown
  Description of Unknown: gRNA target site sequence
ttcctcctctggatccttgcagcagt

SEQ ID NO: 2988 - DNA, 26 bp, Unknown
  Description of Unknown: gRNA target site sequence
taactagcttggaaactggatgaggt

SEQ ID NO: 2989 - DNA, 26 bp, Unknown
  Description of Unknown: gRNA target site sequence
atggttgtggcaggaagaacactgat

SEQ ID NO: 2990 - DNA, 26 bp, Unknown
  Description of Unknown: gRNA target site sequence
ggaggaggtgtttctcctacctgggt

SEQ ID NO: 2991 - DNA, 26 bp, Unknown
  Description of Unknown: gRNA target site sequence
tcttcccaggatttgcttaagtcaat

SEQ ID NO: 2992 - DNA, 26 bp, Unknown
  Description of Unknown: gRNA target site sequence
tgacagaacactgtcttgaagacaat

SEQ ID NO: 2993 - DNA, 26 bp, Unknown
  Description of Unknown: gRNA target site sequence
aaagaaatcctgacaggaggcctgat

SEQ ID NO: 2994 - DNA, 26 bp, Unknown
  Description of Unknown: gRNA target site sequence
aagaaaccatgtagtttgtatgaagt

SEQ ID NO: 2995 - DNA, 26 bp, Unknown
  Description of Unknown: gRNA target site sequence
agctcaactatcacaggcattacagt

SEQ ID NO: 2996 - DNA, 26 bp, Unknown
  Description of Unknown: gRNA target site sequence
cagagccagccaagccagattggagt

SEQ ID NO: 2997 - DNA, 26 bp, Unknown
  Description of Unknown: gRNA target site sequence
ggacctcagtggctttgcctggagat

SEQ ID NO: 2998 - DNA, 26 bp, Unknown
  Description of Unknown: gRNA target site sequence
gtcaactcattccccatcatgtaggt

SEQ ID NO: 2999 - DNA, 26 bp, Unknown
  Description of Unknown: gRNA target site sequence
ttattgtatttgtttttgcgatcagt

SEQ ID NO: 3000 - DNA, 26 bp, Unknown
  Description of Unknown: gRNA target site sequence
tgcaacaggtgtcaactcagtgaaat

SEQ ID NO: 3001 - DNA, 26 bp, Unknown
  Description of Unknown: gRNA target site sequence
caaaggacatctctgtcaggttgggt

SEQ ID NO: 3002 - DNA, 26 bp, Unknown
  Description of Unknown: gRNA target site sequence
gaaactcaaaacttgtgttgcatgat

SEQ ID NO: 3003 - DNA, 26 bp, Unknown
  Description of Unknown: gRNA target site sequence
caggctgacagccaggtgactgaagt

SEQ ID NO: 3004 - DNA, 26 bp, Unknown
  Description of Unknown: gRNA target site sequence
aagcccacaggagttaacagcagggt

SEQ ID NO: 3005 - DNA, 26 bp, Unknown
  Description of Unknown: gRNA target site sequence
tctgcatctgaaacccacacgtaggt

SEQ ID NO: 3006 - DNA, 26 bp, Unknown
  Description of Unknown: gRNA target site sequence
cagtgaaagcatcacttgggattaat

SEQ ID NO: 3007 - DNA, 26 bp, Unknown
  Description of Unknown: gRNA target site sequence
agcttcgacaaggaaggcaccagagt

SEQ ID NO: 3008 - DNA, 26 bp, Unknown
  Description of Unknown: gRNA target site sequence
tggaagtgatttaagagggaaaggat

SEQ ID NO: 3009 - DNA, 26 bp, Unknown
  Description of Unknown: gRNA target site sequence
tgaagcttcatgttcactttgaggat

SEQ ID NO: 3010 - DNA, 26 bp, Unknown
  Description of Unknown: gRNA target site sequence
aaccatgtagtttgtatgaagtaggt

SEQ ID NO: 3011 - DNA, 26 bp, Unknown
  Description of Unknown: gRNA target site sequence
tgaacaaaacaagccaatccatggat

SEQ ID NO: 3012 - DNA, 26 bp, Unknown
  Description of Unknown: gRNA target site sequence
ttatcacaggtgttggtattggtggt

SEQ ID NO: 3013 - DNA, 26 bp, Unknown
  Description of Unknown: gRNA target site sequence
ccatggattggcttgttttgttcagt

SEQ ID NO: 3014 - DNA, 26 bp, Unknown
  Description of Unknown: gRNA target site sequence
gtggtatcaactggccaaaagatgat

SEQ ID NO: 3015 - DNA, 26 bp, Unknown
  Description of Unknown: gRNA target site sequence
gaaatgtgtttgaacccacacagaat

SEQ ID NO: 3016 - DNA, 26 bp, Unknown
  Description of Unknown: gRNA target site sequence
atgttttagccagtgatgctaaaggt

SEQ ID NO: 3017 - DNA, 26 bp, Unknown
  Description of Unknown: gRNA target site sequence
tgcagtcttctatgcacaaaaacagt

SEQ ID NO: 3018 - DNA, 26 bp, Unknown
  Description of Unknown: gRNA target site sequence
caatatgtgttgagttctattatggt

SEQ ID NO: 3019 - DNA, 26 bp, Unknown
  Description of Unknown: gRNA target site sequence
caccaataccaacacctgtgataaat

SEQ ID NO: 3020 - DNA, 26 bp, Unknown
  Description of Unknown: gRNA target site sequence
tgtctttatcatccttgcatttgaat

SEQ ID NO: 3021 - DNA, 26 bp, Unknown
  Description of Unknown: gRNA target site sequence
ataccttccaagaatgacttgcaggt

SEQ ID NO: 3022 - DNA, 26 bp, Unknown
  Description of Unknown: gRNA target site sequence
ttatatagatagctttgatcccagat

SEQ ID NO: 3023 - DNA, 26 bp, Unknown
  Description of Unknown: gRNA target site sequence
ctatggctatcctttccctcttaaat

SEQ ID NO: 3024 - DNA, 26 bp, Unknown
  Description of Unknown: gRNA target site sequence
catttaggatttcttaagcttagagt

SEQ ID NO: 3025 - DNA, 26 bp, Unknown
  Description of Unknown: gRNA target site sequence
agaggttcagggccagctcactaagt

SEQ ID NO: 3026 - DNA, 26 bp, Unknown
  Description of Unknown: gRNA target site sequence
tttcttaagcttagagtcaatacaat

SEQ ID NO: 3027 - DNA, 26 bp, Unknown
  Description of Unknown: gRNA target site sequence
cctttccctcttaaatcacttccagt

SEQ ID NO: 3028 - DNA, 26 bp, Unknown
  Description of Unknown: gRNA target site sequence
gaaaatgcccccaacagagccagaat

SEQ ID NO: 3029 - DNA, 26 bp, Unknown
  Description of Unknown: gRNA target site sequence
ttggcatgcagccactatttttgagt

SEQ ID NO: 3030 - DNA, 26 bp, Unknown
  Description of Unknown: gRNA target site sequence
ttcctgccacaaccatcttgaagaat

SEQ ID NO: 3031 - DNA, 26 bp, Unknown
  Description of Unknown: gRNA target site sequence
aggagaataaagaccatccaagtggt

SEQ ID NO: 3032 - DNA, 26 bp, Unknown
  Description of Unknown: gRNA target site sequence
tgtgcacacacagaaggcacttgaat

SEQ ID NO: 3033 - DNA, 26 bp, Unknown
  Description of Unknown: gRNA target site sequence
tgggtcaaggaattaagttagggaat

SEQ ID NO: 3034 - DNA, 26 bp, Unknown
  Description of Unknown: gRNA target site sequence
tgtctgatggggatacctttagtggt

SEQ ID NO: 3035 - DNA, 26 bp, Unknown
  Description of Unknown: gRNA target site sequence
ttcaaagcttcaggatcctgaaaggt

SEQ ID NO: 3036 - DNA, 26 bp, Unknown
  Description of Unknown: gRNA target site sequence
ttcagaccagagtgatagattggaat

SEQ ID NO: 3037 - DNA, 26 bp, Unknown
  Description of Unknown: gRNA target site sequence
agtaaagaaggcattcttcccacaat

SEQ ID NO: 3038 - DNA, 26 bp, Unknown
  Description of Unknown: gRNA target site sequence
ctggtattctaaggttatgatagaat

SEQ ID NO: 3039 - DNA, 26 bp, Unknown
  Description of Unknown: gRNA target site sequence
cctctgagcatccttagcactgtgat

SEQ ID NO: 3040 - DNA, 26 bp, Unknown
  Description of Unknown: gRNA target site sequence
actaaccaggcccctctccagtcagt

SEQ ID NO: 3041 - DNA, 26 bp, Unknown
  Description of Unknown: gRNA target site sequence
tgctgcaaggatccagaggaggaagt

SEQ ID NO: 3042 - DNA, 26 bp, Unknown
  Description of Unknown: gRNA target site sequence
agcctagtagttttggagttgtcaat

SEQ ID NO: 3043 - DNA, 26 bp, Unknown
  Description of Unknown: gRNA target site sequence
ctccaccagatactgaatgaatcaat

SEQ ID NO: 3044 - DNA, 26 bp, Unknown
  Description of Unknown: gRNA target site sequence
ggcggcagcaaataaggcaaagagat

SEQ ID NO: 3045 - DNA, 26 bp, Unknown
  Description of Unknown: gRNA target site sequence
gcatccccatattaatcccaagtgat

SEQ ID NO: 3046 - DNA, 26 bp, Unknown
  Description of Unknown: gRNA target site sequence
gggcccaattcttacaaacatgtggt

SEQ ID NO: 3047 - DNA, 26 bp, Unknown
  Description of Unknown: gRNA target site sequence
ttgatttcttcaccactatttgggat

SEQ ID NO: 3048 - DNA, 26 bp, Unknown
  Description of Unknown: gRNA target site sequence
acatgaacattcaatgtcaaacaaat

SEQ ID NO: 3049 - DNA, 26 bp, Unknown
  Description of Unknown: gRNA target site sequence
ttgcctcagctcttggaaattgaaat

SEQ ID NO: 3050 - DNA, 26 bp, Unknown
  Description of Unknown: gRNA target site sequence
aacaagccaatccatggatggaaaat

SEQ ID NO: 3051 - DNA, 26 bp, Unknown
  Description of Unknown: gRNA target site sequence
tgagtggtaggggaaattctgaaggt

SEQ ID NO: 3052 - DNA, 26 bp, Unknown
  Description of Unknown: gRNA target site sequence
aaatgctaaatggatttaggagaaat

SEQ ID NO: 3053 - DNA, 26 bp, Unknown
  Description of Unknown: gRNA target site sequence
gaaatatggactctcttcttcataat

SEQ ID NO: 3054 - DNA, 26 bp, Unknown
  Description of Unknown: gRNA target site sequence
tgggaagaatgccttctttacttaat

SEQ ID NO: 3055 - DNA, 26 bp, Unknown
  Description of Unknown: gRNA target site sequence
ttcccttgcagacaagattgatcaat

SEQ ID NO: 3056 - DNA, 26 bp, Unknown
  Description of Unknown: gRNA target site sequence
gcatctccaggcaaagccactgaggt

SEQ ID NO: 3057 - DNA, 26 bp, Unknown
  Description of Unknown: gRNA target site sequence
tttatggagagtagctggaaaacagt

SEQ ID NO: 3058 - DNA, 26 bp, Unknown
  Description of Unknown: gRNA target site sequence
catgaatgcatgtgagttggtttagt

SEQ ID NO: 3059 - DNA, 26 bp, Unknown
  Description of Unknown: gRNA target site sequence
ggcctggttagttacaggaaggtaat

SEQ ID NO: 3060 - DNA, 26 bp, Unknown
  Description of Unknown: gRNA target site sequence
tatttatcacaggtgttggtattggt

SEQ ID NO: 3061 - DNA, 26 bp, Unknown
  Description of Unknown: gRNA target site sequence
cagtgttagtaaagtgtcaaagggat

SEQ ID NO: 3062 - DNA, 26 bp, Unknown
  Description of Unknown: gRNA target site sequence
gtgtgttttccccacatttgcaaaat

SEQ ID NO: 3063 - DNA, 26 bp, Unknown
  Description of Unknown: gRNA target site sequence
tctgagagggactgtcaaaaagaaat

SEQ ID NO: 3064 - DNA, 26 bp, Unknown
  Description of Unknown: gRNA target site sequence
tggtgagcaaagccatttcactgagt

SEQ ID NO: 3065 - DNA, 26 bp, Unknown
  Description of Unknown: gRNA target site sequence
ctgtgttaaacagcatgccaattgat

SEQ ID NO: 3066 - DNA, 26 bp, Unknown
  Description of Unknown: gRNA target site sequence
aatacttctaagagtgtttatttaat

SEQ ID NO: 3067 - DNA, 26 bp, Unknown
  Description of Unknown: gRNA target site sequence
tgtttttgtgcatagaagactgcaat

SEQ ID NO: 3068 - DNA, 26 bp, Unknown
  Description of Unknown: gRNA target site sequence
aagagaatgtccacagtcctaaaagt

SEQ ID NO: 3069 - DNA, 26 bp, Unknown
  Description of Unknown: gRNA target site sequence
tgatatgatgctcctggggaagtagt

SEQ ID NO: 3070 - DNA, 26 bp, Unknown
  Description of Unknown: gRNA target site sequence
tgttttccccacatttgcaaaatagt

SEQ ID NO: 3071 - DNA, 26 bp, Unknown
  Description of Unknown: gRNA target site sequence
ttccccttcagccaggaagtgaaagt

SEQ ID NO: 3072 - DNA, 26 bp, Unknown
  Description of Unknown: gRNA target site sequence
tgcatgatgtcactcatctgctcaat

SEQ ID NO: 3073 - DNA, 26 bp, Unknown
  Description of Unknown: gRNA target site sequence
tggtttgcaaggaagccacagctggt

SEQ ID NO: 3074 - DNA, 26 bp, Unknown
  Description of Unknown: gRNA target site sequence
tttgcaaggaagccacagctggtggt

SEQ ID NO: 3075 - DNA, 26 bp, Unknown
  Description of Unknown: gRNA target site sequence
gtcattctgaaacctcaaatgccaat

SEQ ID NO: 3076 - DNA, 26 bp, Unknown
  Description of Unknown: gRNA target site sequence
gcacatgtgtaatacatatctgggat

SEQ ID NO: 3077 - DNA, 26 bp, Unknown
  Description of Unknown: gRNA target site sequence
ctttaacttctggctttgctataaat

SEQ ID NO: 3078 - DNA, 26 bp, Unknown
  Description of Unknown: gRNA target site sequence
tttagataaataactgtgattttgat

SEQ ID NO: 3079 - DNA, 26 bp, Unknown
  Description of Unknown: gRNA target site sequence
ccttcttggttaagaaaccatgtagt

SEQ ID NO: 3080 - DNA, 26 bp, Unknown
  Description of Unknown: gRNA target site sequence
gttttacgagaaaggaagccgtgggt

SEQ ID NO: 3081 - DNA, 26 bp, Unknown
  Description of Unknown: gRNA target site sequence
ttatgatgtgggtcaaggaattaagt

SEQ ID NO: 3082 - DNA, 26 bp, Unknown
  Description of Unknown: gRNA target site sequence
gagtgctcacttgggtgggctataat

SEQ ID NO: 3083 - DNA, 26 bp, Unknown
  Description of Unknown: gRNA target site sequence
ttgtttcagcagtcaaaggcagtgat

SEQ ID NO: 3084 - DNA, 26 bp, Unknown
  Description of Unknown: gRNA target site sequence
aaattctgaaggttgaggtacagaat

SEQ ID NO: 3085 - DNA, 26 bp, Unknown
  Description of Unknown: gRNA target site sequence
ataaagggcagagaggcagcggtggt

SEQ ID NO: 3086 - DNA, 26 bp, Unknown
  Description of Unknown: gRNA target site sequence
aatggagttatcacagtgctaaggat

SEQ ID NO: 3087 - DNA, 26 bp, Unknown
  Description of Unknown: gRNA target site sequence
gcatagaagactgcaatgcaacaggt

SEQ ID NO: 3088 - DNA, 26 bp, Unknown
  Description of Unknown: gRNA target site sequence
gcatcacttgggattaatatggggat

SEQ ID NO: 3089 - DNA, 26 bp, Unknown
  Description of Unknown: gRNA target site sequence
taaaaatagctggatagcaaaaaagt

SEQ ID NO: 3090 - DNA, 26 bp, Unknown
  Description of Unknown: gRNA target site sequence
aaactcaacatcatcttttggccagt

SEQ ID NO: 3091 - DNA, 26 bp, Unknown
  Description of Unknown: gRNA target site sequence
tagaaattcagaccagagtgatagat

SEQ ID NO: 3092 - DNA, 26 bp, Unknown
  Description of Unknown: gRNA target site sequence
tgtggtacagaactcttaaagagaat

SEQ ID NO: 3093 - DNA, 26 bp, Unknown
  Description of Unknown: gRNA target site sequence
tctttgagcaaaatggtgagtgtggt

SEQ ID NO: 3094 - DNA, 26 bp, Unknown
  Description of Unknown: gRNA target site sequence
tggtttagtagagagacacaggcaat

SEQ ID NO: 3095 - DNA, 26 bp, Unknown
  Description of Unknown: gRNA target site sequence
gtaggggaaattctgaaggttgaggt

SEQ ID NO: 3096 - DNA, 26 bp, Unknown
  Description of Unknown: gRNA target site sequence
caactgctccctgctggccctggaat

SEQ ID NO: 3097 - DNA, 26 bp, Unknown
  Description of Unknown: gRNA target site sequence
tcacatatagtaagagataattagat

SEQ ID NO: 3098 - DNA, 26 bp, Unknown
  Description of Unknown: gRNA target site sequence
gagaggggaaggggtaagtgatagat

SEQ ID NO: 3099 - DNA, 26 bp, Unknown
  Description of Unknown: gRNA target site sequence
ttatagcaaagccagaagttaaaggt

SEQ ID NO: 3100 - DNA, 26 bp, Unknown
  Description of Unknown: gRNA target site sequence
aaagtaatgaactactgcaatggagt

SEQ ID NO: 3101 - DNA, 26 bp, Unknown
  Description of Unknown: gRNA target site sequence
atgctttcactgaaagtggagctgat

SEQ ID NO: 3102 - DNA, 26 bp, Unknown
  Description of Unknown: gRNA target site sequence
ctcacagctgtttctttgagcaaaat

SEQ ID NO: 3103 - DNA, 26 bp, Unknown
  Description of Unknown: gRNA target site sequence
ctaatacaccaggtagaacacaaggt

SEQ ID NO: 3104 - DNA, 26 bp, Unknown
  Description of Unknown: gRNA target site sequence
aaagctatctatataaagtccttgat

SEQ ID NO: 3105 - DNA, 26 bp, Unknown
  Description of Unknown: gRNA target site sequence
ttaaatggcaatcatttgccttgaat

SEQ ID NO: 3106 - DNA, 26 bp, Unknown
  Description of Unknown: gRNA target site sequence
tggggagagggcaggacatttaggat

SEQ ID NO: 3107 - DNA, 26 bp, Unknown
  Description of Unknown: gRNA target site sequence
tgttgagttctattatggttagaagt

SEQ ID NO: 3108 - DNA, 26 bp, Unknown
  Description of Unknown: gRNA target site sequence
catgcagccactatttttgagttgat

SEQ ID NO: 3109 - DNA, 26 bp, Unknown
  Description of Unknown: gRNA target site sequence
cacagaatcaaggactttatatagat

SEQ ID NO: 3110 - DNA, 26 bp, Unknown
  Description of Unknown: gRNA target site sequence
gcatactcacacacaaagctggcgat

SEQ ID NO: 3111 - DNA, 26 bp, Unknown
  Description of Unknown: gRNA target site sequence
gagtagctggaaaacagttgagagat

SEQ ID NO: 3112 - DNA, 26 bp, Unknown
  Description of Unknown: gRNA target site sequence
gtcttcaagacagtgttctgtcaagt

SEQ ID NO: 3113 - DNA, 26 bp, Unknown
  Description of Unknown: gRNA target site sequence
ggccttttctccccccttcaacgaat

SEQ ID NO: 3114 - DNA, 26 bp, Unknown
  Description of Unknown: gRNA target site sequence
agagataaggttgagattcaatggat

SEQ ID NO: 3115 - DNA, 26 bp, Unknown
  Description of Unknown: gRNA target site sequence
ataaacactcttagaagtatttaaat

SEQ ID NO: 3116 - DNA, 26 bp, Unknown
  Description of Unknown: gRNA target site sequence
tctttaagagttctgtaccacatggt

SEQ ID NO: 3117 - DNA, 26 bp, Unknown
  Description of Unknown: gRNA target site sequence
agtaagagataattagatgagatgat

SEQ ID NO: 3118 - DNA, 26 bp, Unknown
  Description of Unknown: gRNA target site sequence
tcccaagtgatgctttcactgaaagt

SEQ ID NO: 3119 - DNA, 26 bp, Unknown
  Description of Unknown: gRNA target site sequence
tttgccttccccttcagccaggaagt

SEQ ID NO: 3120 - DNA, 26 bp, Unknown
  Description of Unknown: gRNA target site sequence
agtaagaaaatatctttatggagagt

SEQ ID NO: 3121 - DNA, 26 bp, Unknown
  Description of Unknown: gRNA target site sequence
gacatcatgcaacacaagttttgagt

SEQ ID NO: 3122 - DNA, 26 bp, Unknown
  Description of Unknown: gRNA target site sequence
ttttacagtcagaatgctattaaggt

SEQ ID NO: 3123 - DNA, 26 bp, Unknown
  Description of Unknown: gRNA target site sequence
gaattcatctctctttaatataaagt

SEQ ID NO: 3124 - DNA, 26 bp, Unknown
  Description of Unknown: gRNA target site sequence
gccattttgatctgccttcctgaaat

SEQ ID NO: 3125 - DNA, 26 bp, Unknown
  Description of Unknown: gRNA target site sequence
gtggttcatgaactcctgtgagcagt

SEQ ID NO: 3126 - DNA, 26 bp, Unknown
  Description of Unknown: gRNA target site sequence
ttgggtagaggatgttggaatagagt

SEQ ID NO: 3127 - DNA, 26 bp, Unknown
  Description of Unknown: gRNA target site sequence
cagaatcttgctttatctctcaaagt

SEQ ID NO: 3128 - DNA, 26 bp, Unknown
  Description of Unknown: gRNA target site sequence
agcaaaatggtgagtgtggtgctgat

SEQ ID NO: 3129 - DNA, 26 bp, Unknown
  Description of Unknown: gRNA target site sequence
cctaaagtaaatttatctcaaccagt

SEQ ID NO: 3130 - DNA, 26 bp, Unknown
  Description of Unknown: gRNA target site sequence
aaggagtagaaagacagagctgggat

SEQ ID NO: 3131 - DNA, 26 bp, Unknown
  Description of Unknown: gRNA target site sequence
aaaatggtgagtgtggtgctgatggt

SEQ ID NO: 3132 - DNA, 26 bp, Unknown
  Description of Unknown: gRNA target site sequence
gacatagcagtcctttataaatcaat

SEQ ID NO: 3133 - DNA, 26 bp, Unknown
  Description of Unknown: gRNA target site sequence
tacagcaaaggacatctctgtcaggt

SEQ ID NO: 3134 - DNA, 26 bp, Unknown
  Description of Unknown: gRNA target site sequence
agcttgataagataataagctttagt

SEQ ID NO: 3135 - DNA, 26 bp, Unknown
  Description of Unknown: gRNA target site sequence
aggttcacttgatttccactggaggt

SEQ ID NO: 3136 - DNA, 26 bp, Unknown
  Description of Unknown: gRNA target site sequence
gaaagaacacccagaaagcctatgat

SEQ ID NO: 3137 - DNA, 26 bp, Unknown
  Description of Unknown: gRNA target site sequence
atagggtgatttataagcaggaaagt

SEQ ID NO: 3138 - DNA, 26 bp, Unknown
  Description of Unknown: gRNA target site sequence
ttcttcataatggtttctcaattgat

SEQ ID NO: 3139 - DNA, 26 bp, Unknown
  Description of Unknown: gRNA target site sequence
tatagtaagagataattagatgagat

SEQ ID NO: 3140 - DNA, 26 bp, Unknown
  Description of Unknown: gRNA target site sequence
tgacagagatgtcctttgctgtaggt

SEQ ID NO: 3141 - DNA, 26 bp, Unknown
  Description of Unknown: gRNA target site sequence
acaaagcagagcctccctgagacagt

SEQ ID NO: 3142 - DNA, 26 bp, Unknown
  Description of Unknown: gRNA target site sequence
agaaacagtaattactactgaggaat

SEQ ID NO: 3143 - DNA, 26 bp, Unknown
  Description of Unknown: gRNA target site sequence
ggaatacagagccagccaagccagat

SEQ ID NO: 3144 - DNA, 26 bp, Unknown
  Description of Unknown: gRNA target site sequence
atggtgcttcacagatagaatacagt

SEQ ID NO: 3145 - DNA, 26 bp, Unknown
  Description of Unknown: gRNA target site sequence
tctcctatcttccattcaaggcaaat

SEQ ID NO: 3146 - DNA, 26 bp, Unknown
  Description of Unknown: gRNA target site sequence
acagctgtttctttgagcaaaatggt

SEQ ID NO: 3147 - DNA, 26 bp, Unknown
  Description of Unknown: gRNA target site sequence
catccctgtcttctgcaaaggtgagt

SEQ ID NO: 3148 - DNA, 26 bp, Unknown
  Description of Unknown: gRNA target site sequence
agttttgttccttaatttcaggaggt

SEQ ID NO: 3149 - DNA, 26 bp, Unknown
  Description of Unknown: gRNA target site sequence
attcaaggttttaaggttctcttaat

SEQ ID NO: 3150 - DNA, 26 bp, Unknown
  Description of Unknown: gRNA target site sequence
ctgagaaatagattcttcaagatggt

SEQ ID NO: 3151 - DNA, 26 bp, Unknown
  Description of Unknown: gRNA target site sequence
caactggccaaaagatgatgttgagt

SEQ ID NO: 3152 - DNA, 26 bp, Unknown
  Description of Unknown: gRNA target site sequence
gagctcaggacactaatacaccaggt

SEQ ID NO: 3153 - DNA, 26 bp, Unknown
  Description of Unknown: gRNA target site sequence
aaagattattgagtgctcacttgggt

SEQ ID NO: 3154 - DNA, 26 bp, Unknown
  Description of Unknown: gRNA target site sequence
taaaatgatgagtatatccattgaat

SEQ ID NO: 3155 - DNA, 26 bp, Unknown
  Description of Unknown: gRNA target site sequence
tggagacttggagaatttcctggagt

SEQ ID NO: 3156 - DNA, 26 bp, Unknown
  Description of Unknown: gRNA target site sequence
ctcctccatcttcatgctccaaaagt

SEQ ID NO: 3157 - DNA, 26 bp, Unknown
  Description of Unknown: gRNA target site sequence
tcaattctactagctaattagccaat

SEQ ID NO: 3158 - DNA, 26 bp, Unknown
  Description of Unknown: gRNA target site sequence
agagagagataaggttgagattcaat

SEQ ID NO: 3159 - DNA, 26 bp, Unknown
  Description of Unknown: gRNA target site sequence
gttttgttcagttgagtgcttgaggt

SEQ ID NO: 3160 - DNA, 26 bp, Unknown
  Description of Unknown: gRNA target site sequence
aaggtggaaagacactgccatatagt

SEQ ID NO: 3161 - DNA, 26 bp, Unknown
  Description of Unknown: gRNA target site sequence
gttcatgaactcctgtgagcagtgat

SEQ ID NO: 3162 - DNA, 26 bp, Unknown
  Description of Unknown: gRNA target site sequence
tgggagtgttcaagggaaggagaaat

SEQ ID NO: 3163 - DNA, 26 bp, Unknown
  Description of Unknown: gRNA target site sequence
agatactgaatgaatcaatcaaaaat

SEQ ID NO: 3164 - DNA, 26 bp, Unknown
  Description of Unknown: gRNA target site sequence
ttcagccttattttattcccatcaat

SEQ ID NO: 3165 - DNA, 26 bp, Unknown
  Description of Unknown: gRNA target site sequence
tttgctaactagcttggaaactggat

SEQ ID NO: 3166 - DNA, 26 bp, Unknown
  Description of Unknown: gRNA target site sequence
tgtcaatgaaatgaattggactggat

SEQ ID NO: 3167 - DNA, 26 bp, Unknown
  Description of Unknown: gRNA target site sequence
ggcttcatgaatgcatgtgagttggt

SEQ ID NO: 3168 - DNA, 26 bp, Unknown
  Description of Unknown: gRNA target site sequence
agtttttatttatcacaggtgttggt

SEQ ID NO: 3169 - DNA, 26 bp, Unknown
  Description of Unknown: gRNA target site sequence
ttttggagcatgaagatggaggaggt

SEQ ID NO: 3170 - DNA, 26 bp, Unknown
  Description of Unknown: gRNA target site sequence
ctttacttaattcaaggttttaaggt

SEQ ID NO: 3171 - DNA, 26 bp, Unknown
  Description of Unknown: gRNA target site sequence
tctcctaaatccatttagcatttggt

SEQ ID NO: 3172 - DNA, 26 bp, Unknown
  Description of Unknown: gRNA target site sequence
tgggaagagtttttttgctatacaat

SEQ ID NO: 3173 - DNA, 26 bp, Unknown
  Description of Unknown: gRNA target site sequence
tgtggagaggggaaggggtaagtgat

SEQ ID NO: 3174 - DNA, 26 bp, Unknown
  Description of Unknown: gRNA target site sequence
ccagcttgtttaaaatgtagggaaat

SEQ ID NO: 3175 - DNA, 26 bp, Unknown
  Description of Unknown: gRNA target site sequence
accctcccaatactggaaagttgagt

SEQ ID NO: 3176 - DNA, 26 bp, Unknown
  Description of Unknown: gRNA target site sequence
ttagaattgcctcagctcttggaaat

SEQ ID NO: 3177 - DNA, 26 bp, Unknown
  Description of Unknown: gRNA target site sequence
aagctaacagccctgaaacatgagat

SEQ ID NO: 3178 - DNA, 26 bp, Unknown
  Description of Unknown: gRNA target site sequence
actgactggagaggggcctggttagt

SEQ ID NO: 3179 - DNA, 26 bp, Unknown
  Description of Unknown: gRNA target site sequence
agctcacaagttcctttaaaaaaaat

SEQ ID NO: 3180 - DNA, 26 bp, Unknown
  Description of Unknown: gRNA target site sequence
aagattaaataaacactcttagaagt

SEQ ID NO: 3181 - DNA, 26 bp, Unknown
  Description of Unknown: gRNA target site sequence
gtgtcaaagggattgagcagatgagt

SEQ ID NO: 3182 - DNA, 26 bp, Unknown
  Description of Unknown: gRNA target site sequence
tttgaatataaacactatatggcagt

SEQ ID NO: 3183 - DNA, 26 bp, Unknown
  Description of Unknown: gRNA target site sequence
gagtatttttgaagccttgatgtaat

SEQ ID NO: 3184 - DNA, 26 bp, Unknown
  Description of Unknown: gRNA target site sequence
taaatataaggtgtgtacaatatagt

SEQ ID NO: 3185 - DNA, 26 bp, Unknown
  Description of Unknown: gRNA target site sequence
agatattttcttactgagaaatagat

SEQ ID NO: 3186 - DNA, 26 bp, Unknown
  Description of Unknown: gRNA target site sequence
gttctctggtattctaaggttatgat

SEQ ID NO: 3187 - DNA, 26 bp, Unknown
  Description of Unknown: gRNA target site sequence
attacagttgtcatggcaaccccaat

SEQ ID NO: 3188 - DNA, 26 bp, Unknown
  Description of Unknown: gRNA target site sequence
cctacattttaaacaagctggctaat

SEQ ID NO: 3189 - DNA, 26 bp, Unknown
  Description of Unknown: gRNA target site sequence
ctttccaccttgggtcccagggaagt

SEQ ID NO: 3190 - DNA, 26 bp, Unknown
  Description of Unknown: gRNA target site sequence
tttttattaatgatgcctagacaaat

SEQ ID NO: 3191 - DNA, 26 bp, Unknown
  Description of Unknown: gRNA target site sequence
aataactttaatacagagcagaaagt

SEQ ID NO: 3192 - DNA, 26 bp, Unknown
  Description of Unknown: gRNA target site sequence
ttagatgaatttgtttgacattgaat

SEQ ID NO: 3193 - DNA, 26 bp, Unknown
  Description of Unknown: gRNA target site sequence
aaatgattgccatttaacatcaaaat

SEQ ID NO: 3194 - DNA, 26 bp, Unknown
  Description of Unknown: gRNA target site sequence
taggacacactttcctgcttataaat

SEQ ID NO: 3195 - DNA, 26 bp, Unknown
  Description of Unknown: gRNA target site sequence
tatttgtttgtgcatttggggggaat

SEQ ID NO: 3196 - DNA, 26 bp, Unknown
  Description of Unknown: gRNA target site sequence
gccatggacagaagaaggcagcaggt

SEQ ID NO: 3197 - DNA, 26 bp, Unknown
  Description of Unknown: gRNA target site sequence
aaggttttaaggttctcttaatcaat

SEQ ID NO: 3198 - DNA, 26 bp, Unknown
  Description of Unknown: gRNA target site sequence
aggcataaaatttaacttgaaaagat

SEQ ID NO: 3199 - DNA, 26 bp, Unknown
  Description of Unknown: gRNA target site sequence
atagttgagctgagaaagcaggcggt

SEQ ID NO: 3200 - DNA, 26 bp, Unknown
  Description of Unknown: gRNA target site sequence
ccaggtcttctgtttgtcatatcagt

SEQ ID NO: 3201 - DNA, 26 bp, Unknown
  Description of Unknown: gRNA target site sequence
cactgcctttgactgctgaaacaaat

SEQ ID NO: 3202 - DNA, 26 bp, Unknown
  Description of Unknown: gRNA target site sequence
catttgtttcagcagtcaaaggcagt

SEQ ID NO: 3203 - DNA, 26 bp, Unknown
  Description of Unknown: gRNA target site sequence
caagctggctaattcatttataaagt

SEQ ID NO: 3204 - DNA, 26 bp, Unknown
  Description of Unknown: gRNA target site sequence
attaagagaaccttaaaaccttgaat

SEQ ID NO: 3205 - DNA, 26 bp, Unknown
  Description of Unknown: gRNA target site sequence
caagtggcttggtggaagggactagt

SEQ ID NO: 3206 - DNA, 26 bp, Unknown
  Description of Unknown: gRNA target site sequence
ttcatgttcactttgaggatctggat

SEQ ID NO: 3207 - DNA, 26 bp, Unknown
  Description of Unknown: gRNA target site sequence
tgaatagaaagcctttttgttttggt

SEQ ID NO: 3208 - DNA, 26 bp, Unknown
  Description of Unknown: gRNA target site sequence
ttatagccgaaatgatcttttcaagt

SEQ ID NO: 3209 - DNA, 26 bp, Unknown
  Description of Unknown: gRNA target site sequence
ataatggtttctcaattgatgggaat

SEQ ID NO: 3210 - DNA, 26 bp, Unknown
  Description of Unknown: gRNA target site sequence
acgtgggttaacacagacatagcagt

SEQ ID NO: 3211 - DNA, 26 bp, Unknown
  Description of Unknown: gRNA target site sequence
taggttcagcagtggggatgagaaat

SEQ ID NO: 3212 - DNA, 26 bp, Unknown
  Description of Unknown: gRNA target site sequence
ataatagaactcaacacatattgggt

SEQ ID NO: 3213 - DNA, 26 bp, Unknown
  Description of Unknown: gRNA target site sequence
gcacaaaaacagttttgttccttaat

SEQ ID NO: 3214 - DNA, 26 bp, Unknown
  Description of Unknown: gRNA target site sequence
agagcttttccctgtggcttccaaat

SEQ ID NO: 3215 - DNA, 26 bp, Unknown
  Description of Unknown: gRNA target site sequence
gtttcagaatgactaatattttagat

SEQ ID NO: 3216 - DNA, 26 bp, Unknown
  Description of Unknown: gRNA target site sequence
tctcttcttcataatggtttctcaat

SEQ ID NO: 3217 - DNA, 26 bp, Unknown
  Description of Unknown: gRNA target site sequence
caatgtcaaacaaattcatctaaaat

SEQ ID NO: 3218 - DNA, 26 bp, Unknown
  Description of Unknown: gRNA target site sequence
tccttttttcaccaatgttggggagt

SEQ ID NO: 3219 - DNA, 26 bp, Unknown
  Description of Unknown: gRNA target site sequence
catgaaaatgcaacaacatgtataat

SEQ ID NO: 3220 - DNA, 26 bp, Unknown
  Description of Unknown: gRNA target site sequence
accagagtgatagattggaattggat

SEQ ID NO: 3221 - DNA, 26 bp, Unknown
  Description of Unknown: gRNA target site sequence
ttgccccaaatcacatatttcatggt

SEQ ID NO: 3222 - DNA, 26 bp, Unknown
  Description of Unknown: gRNA target site sequence
atccatggatggaaaatgtattcaat

SEQ ID NO: 3223 - DNA, 26 bp, Unknown
  Description of Unknown: gRNA target site sequence
tgtattaaagttatttgtgagctaat

SEQ ID NO: 3224 - DNA, 26 bp, Unknown
  Description of Unknown: gRNA target site sequence
gccattagcccaagggctcagaaagt

SEQ ID NO: 3225 - DNA, 26 bp, Unknown
  Description of Unknown: gRNA target site sequence
tgagagatggaggggaggctgggggt

SEQ ID NO: 3226 - DNA, 26 bp, Unknown
  Description of Unknown: gRNA target site sequence
cttgcatttgaatattgtgttcaaat

SEQ ID NO: 3227 - DNA, 26 bp, Unknown
  Description of Unknown: gRNA target site sequence
cattactttctgctctgtattaaagt

SEQ ID NO: 3228 - DNA, 26 bp, Unknown
  Description of Unknown: gRNA target site sequence
catgtccctctccatcacctggaagt

SEQ ID NO: 3229 - DNA, 26 bp, Unknown
  Description of Unknown: gRNA target site sequence
tgtccttcatttttttcacatatagt

SEQ ID NO: 3230 - DNA, 26 bp, Unknown
  Description of Unknown: gRNA target site sequence
atcacagttatttatctaaaataaat

SEQ ID NO: 3231 - DNA, 26 bp, Unknown
  Description of Unknown: gRNA target site sequence
caagtaaaagagtgaggagatatgat

SEQ ID NO: 3232 - DNA, 26 bp, Unknown
  Description of Unknown: gRNA target site sequence
agcagaaagtaatgaactactgcaat

SEQ ID NO: 3233 - DNA, 26 bp, Unknown
  Description of Unknown: gRNA target site sequence
aggatgcccagaagattgaataaaat

SEQ ID NO: 3234 - DNA, 26 bp, Unknown
  Description of Unknown: gRNA target site sequence
agtctgtttggcatacaatacttaat

SEQ ID NO: 3235 - DNA, 26 bp, Unknown
  Description of Unknown: gRNA target site sequence
tatgcacaatactatcaaattaaaat

SEQ ID NO: 3236 - DNA, 26 bp, Unknown
  Description of Unknown: gRNA target site sequence
cttaattccttgacccacatcataat

SEQ ID NO: 3237 - DNA, 26 bp, Unknown
  Description of Unknown: gRNA target site sequence
tttgtgtatttgttaatggtttgaat

SEQ ID NO: 3238 - DNA, 26 bp, Unknown
  Description of Unknown: gRNA target site sequence
ggtctagagagagataaggttgagat

SEQ ID NO: 3239 - DNA, 26 bp, Unknown
  Description of Unknown: gRNA target site sequence
gatctgtacttttgatatgatatgat

SEQ ID NO: 3240 - DNA, 26 bp, Unknown
  Description of Unknown: gRNA target site sequence
ttttttctcttaaccaaatgctaaat

SEQ ID NO: 3241 - DNA, 26 bp, Unknown
  Description of Unknown: gRNA target site sequence
cactcacctttgcagaagacagggat

SEQ ID NO: 3242 - DNA, 26 bp, Unknown
  Description of Unknown: gRNA target site sequence
gattggcttgttttgttcagttgagt

SEQ ID NO: 3243 - DNA, 26 bp, Unknown
  Description of Unknown: gRNA target site sequence
ttactgagaaatagattcttcaagat

SEQ ID NO: 3244 - DNA, 26 bp, Unknown
  Description of Unknown: gRNA target site sequence
tgagtttagtgttcttgagatgagat

SEQ ID NO: 3245 - DNA, 26 bp, Unknown
  Description of Unknown: gRNA target site sequence
caagaaggtctagagagagataaggt

SEQ ID NO: 3246 - DNA, 26 bp, Unknown
  Description of Unknown: gRNA target site sequence
tcttgagatgagatgaggcaataaat

SEQ ID NO: 3247 - DNA, 26 bp, Unknown
  Description of Unknown: gRNA target site sequence
aactgttttctcttctgaggacagat

SEQ ID NO: 3248 - DNA, 26 bp, Unknown
  Description of Unknown: gRNA target site sequence
aatgttggggagtagagccctagagt

SEQ ID NO: 3249 - DNA, 26 bp, Unknown
  Description of Unknown: gRNA target site sequence
caagctcacactcatcaccactaaat

SEQ ID NO: 3250 - DNA, 26 bp, Unknown
  Description of Unknown: gRNA target site sequence
catgaagcttcagtttcaaattgaat

SEQ ID NO: 3251 - DNA, 26 bp, Unknown
  Description of Unknown: gRNA target site sequence
aagtattgtatgccaaacagactggt

SEQ ID NO: 3252 - DNA, 26 bp, Unknown
  Description of Unknown: gRNA target site sequence
atatggactctcttcttcataatggt

SEQ ID NO: 3253 - DNA, 26 bp, Unknown
  Description of Unknown: gRNA target site sequence
gaaataaagggcagagaggcagcggt

SEQ ID NO: 3254 - DNA, 26 bp, Unknown
  Description of Unknown: gRNA target site sequence
tatatttcaggaaggcagatcaaaat

SEQ ID NO: 3255 - DNA, 26 bp, Unknown
  Description of Unknown: gRNA target site sequence
cctcctaaatcccaattttattcaat

SEQ ID NO: 3256 - DNA, 26 bp, Unknown
  Description of Unknown: gRNA target site sequence
aactgaaaaaccacaaaaggacaaat

SEQ ID NO: 3257 - DNA, 26 bp, Unknown
  Description of Unknown: gRNA target site sequence
ggcattggcatttgaggtttcagaat

SEQ ID NO: 3258 - DNA, 26 bp, Unknown
  Description of Unknown: gRNA target site sequence
tgagggttagggaaggaagctgtagt

SEQ ID NO: 3259 - DNA, 26 bp, Unknown
  Description of Unknown: gRNA target site sequence
tgctatacaattcaaggttttaaggt

SEQ ID NO: 3260 - DNA, 26 bp, Unknown
  Description of Unknown: gRNA target site sequence
aacagagccagaatgtgaaaagcaat

SEQ ID NO: 3261 - DNA, 26 bp, Unknown
  Description of Unknown: gRNA target site sequence
catctgtcctcagaagagaaaacagt

SEQ ID NO: 3262 - DNA, 26 bp, Unknown
  Description of Unknown: gRNA target site sequence
ggttaaggatgcccagaagattgaat

SEQ ID NO: 3263 - DNA, 26 bp, Unknown
  Description of Unknown: gRNA target site sequence
tatctcctcactcttttacttgtggt

SEQ ID NO: 3264 - DNA, 26 bp, Unknown
  Description of Unknown: gRNA target site sequence
aagctctatatttcaggaaggcagat

SEQ ID NO: 3265 - DNA, 26 bp, Unknown
  Description of Unknown: gRNA target site sequence
caagggaacaagcttgataagataat

SEQ ID NO: 3266 - DNA, 26 bp, Unknown
  Description of Unknown: gRNA target site sequence
cgtttgatctgtacttttgatatgat

SEQ ID NO: 3267 - DNA, 26 bp, Unknown
  Description of Unknown: gRNA target site sequence
gctcagaaagttagcagcctagtagt

SEQ ID NO: 3268 - DNA, 26 bp, Unknown
  Description of Unknown: gRNA target site sequence
tataaagtccttgattctgtgtgggt

SEQ ID NO: 3269 - DNA, 26 bp, Unknown
  Description of Unknown: gRNA target site sequence
aaatgtagggaaattgtgggaagaat

SEQ ID NO: 3270 - DNA, 26 bp, Unknown
  Description of Unknown: gRNA target site sequence
tagtcctgaatacatttgagctgggt

SEQ ID NO: 3271 - DNA, 26 bp, Unknown
  Description of Unknown: gRNA target site sequence
ccagagaacatatcatctcatctaat

SEQ ID NO: 3272 - DNA, 26 bp, Unknown
  Description of Unknown: gRNA target site sequence
aaataactgtgattttgatgttaaat

SEQ ID NO: 3273 - DNA, 26 bp, Unknown
  Description of Unknown: gRNA target site sequence
cttttacaccagttcctttcaatggt

SEQ ID NO: 3274 - DNA, 26 bp, Unknown
  Description of Unknown: gRNA target site sequence
aatacatttgagctgggtttcaggat

SEQ ID NO: 3275 - DNA, 26 bp, Unknown
  Description of Unknown: gRNA target site sequence
tggaaactggatgaggtcatagcagt

SEQ ID NO: 3276 - DNA, 26 bp, Unknown
  Description of Unknown: gRNA target site sequence
tagctggatagcaaaaaagttagaat

SEQ ID NO: 3277 - DNA, 26 bp, Unknown
  Description of Unknown: gRNA target site sequence
ttttcttatttttacatgttttaaat

SEQ ID NO: 3278 - DNA, 26 bp, Unknown
  Description of Unknown: gRNA target site sequence
atttattttagataaataactgtgat

SEQ ID NO: 3279 - DNA, 26 bp, Unknown
  Description of Unknown: gRNA target site sequence
ttcagtttgtttccagtatttctaat

SEQ ID NO: 3280 - DNA, 26 bp, Unknown
  Description of Unknown: gRNA target site sequence
catgtgcttctgagcagggtttcaat

SEQ ID NO: 3281 - DNA, 26 bp, Unknown
  Description of Unknown: gRNA target site sequence
tataaacctcaggagattttcttgat

SEQ ID NO: 3282 - DNA, 26 bp, Unknown
  Description of Unknown: gRNA target site sequence
aaaaacaggagagtgcagggccaggt

SEQ ID NO: 3283 - DNA, 26 bp, Unknown
  Description of Unknown: gRNA target site sequence
gcatttgaggtttcagaatgactaat

SEQ ID NO: 3284 - DNA, 26 bp, Unknown
  Description of Unknown: gRNA target site sequence
cggattcatatactttataaatgaat

SEQ ID NO: 3285 - DNA, 26 bp, Unknown
  Description of Unknown: gRNA target site sequence
ggtttctcaattgatgggaataaaat

SEQ ID NO: 3286 - DNA, 26 bp, Unknown
  Description of Unknown: gRNA target site sequence
ccagaagttaaaggtaaaactccaat

SEQ ID NO: 3287 - DNA, 26 bp, Unknown
  Description of Unknown: gRNA target site sequence
tatagcaaaaaaactcttcccaggat

SEQ ID NO: 3288 - DNA, 26 bp, Unknown
  Description of Unknown: gRNA target site sequence
ttagaagtatttaaatttcctaaagt

SEQ ID NO: 3289 - DNA, 26 bp, Unknown
  Description of Unknown: gRNA target site sequence
ccatcttgaagaatctatttctcagt

SEQ ID NO: 3290 - DNA, 26 bp, Unknown
  Description of Unknown: gRNA target site sequence
aaaacaaaaaggctttctattcaagt

SEQ ID NO: 3291 - DNA, 26 bp, Unknown
  Description of Unknown: gRNA target site sequence
aaatgaatgttcacagcatacagaat

SEQ ID NO: 3292 - DNA, 26 bp, Unknown
  Description of Unknown: gRNA target site sequence
tggtagaagaggtagaattatggaat

SEQ ID NO: 3293 - DNA, 26 bp, Unknown
  Description of Unknown: gRNA target site sequence
tgtactacaatttaaagcaaaggagt

SEQ ID NO: 3294 - DNA, 26 bp, Unknown
  Description of Unknown: gRNA target site sequence
atgcacgtggcccagcctgctgtggt

SEQ ID NO: 3295 - DNA, 26 bp, Unknown
  Description of Unknown: gRNA target site sequence
tatctcttactatatgtgaaaaaaat

SEQ ID NO: 3296 - DNA, 26 bp, Unknown
  Description of Unknown: gRNA target site sequence
attaaatcatcaaatatcttttgagt

SEQ ID NO: 3297 - DNA, 26 bp, Unknown
  Description of Unknown: gRNA target site sequence
atgattagctcacaaataactttaat

SEQ ID NO: 3298 - DNA, 26 bp, Unknown
  Description of Unknown: gRNA target site sequence
ggactgtggacattctctttaagagt

SEQ ID NO: 3299 - DNA, 26 bp, Unknown
  Description of Unknown: gRNA target site sequence
ttagatgagatgatatgttctctggt

SEQ ID NO: 3300 - DNA, 26 bp, Unknown
  Description of Unknown: gRNA target site sequence
tgatcgcaaaaacaaatacaataaat

SEQ ID NO: 3301 - DNA, 26 bp, Unknown
  Description of Unknown: gRNA target site sequence
agtttttttgctatacaattcaaggt

SEQ ID NO: 3302 - DNA, 26 bp, Unknown
  Description of Unknown: gRNA target site sequence
acgaccaccacagatttttatttaat

SEQ ID NO: 3303 - DNA, 26 bp, Unknown
  Description of Unknown: gRNA target site sequence
tgaacacaatattcaaatgcaaggat

SEQ ID NO: 3304 - DNA, 26 bp, Unknown
  Description of Unknown: gRNA target site sequence
agtcaatacaataaagattattgagt

SEQ ID NO: 3305 - DNA, 26 bp, Unknown
  Description of Unknown: gRNA target site sequence
ccagggaaggcggaggctggtacagt

SEQ ID NO: 3306 - DNA, 26 bp, Unknown
  Description of Unknown: gRNA target site sequence
actcacatggctatgttttagccagt

SEQ ID NO: 3307 - DNA, 26 bp, Unknown
  Description of Unknown: gRNA target site sequence
catgtgagtatttttgaagccttgat

SEQ ID NO: 3308 - DNA, 26 bp, Unknown
  Description of Unknown: gRNA target site sequence
catccaactttatattaaagagagat

SEQ ID NO: 3309 - DNA, 26 bp, Unknown
  Description of Unknown: gRNA target site sequence
gtattccagggccagcagggagcagt

SEQ ID NO: 3310 - DNA, 26 bp, Unknown
  Description of Unknown: gRNA target site sequence
cactcaactgaacaaaacaagccaat

SEQ ID NO: 3311 - DNA, 26 bp, Unknown
  Description of Unknown: gRNA target site sequence
acacaatattcaaatgcaaggatgat

SEQ ID NO: 3312 - DNA, 26 bp, Unknown
  Description of Unknown: gRNA target site sequence
acatatatgaatatttcttctccagt

SEQ ID NO: 3313 - DNA, 26 bp, Unknown
  Description of Unknown: gRNA target site sequence
gaaggcagcaggtggcagaatggggt

SEQ ID NO: 3314 - DNA, 26 bp, Unknown
  Description of Unknown: gRNA target site sequence
tgggggaagtgtgacttgccccaaat

SEQ ID NO: 3315 - DNA, 26 bp, Unknown
  Description of Unknown: gRNA target site sequence
ctgtttctttgagcaaaatggtgagt

SEQ ID NO: 3316 - DNA, 26 bp, Unknown
  Description of Unknown: gRNA target site sequence
tgtctcttatacacatacacaaagat

SEQ ID NO: 3317 - DNA, 26 bp, Unknown
  Description of Unknown: gRNA target site sequence
tgaaaaaccacaaaaggacaaataat

SEQ ID NO: 3318 - DNA, 26 bp, Unknown
  Description of Unknown: gRNA target site sequence
tgatgggaataaaataaggctgaaat

SEQ ID NO: 3319 - DNA, 26 bp, Unknown
  Description of Unknown: gRNA target site sequence
agtttttgacatatactttgagagat

SEQ ID NO: 3320 - DNA, 26 bp, Unknown
  Description of Unknown: gRNA target site sequence
caaacaaattcatctaaaatattagt

SEQ ID NO: 3321 - DNA, 26 bp, Unknown
  Description of Unknown: gRNA target site sequence
catcatatcatatcaaaagtacagat

SEQ ID NO: 3322 - DNA, 26 bp, Unknown
  Description of Unknown: gRNA target site sequence
tgagaaatacagctctcaaacaggat

SEQ ID NO: 3323 - DNA, 26 bp, Unknown
  Description of Unknown: gRNA target site sequence
tcctttgttctcttttcccacaggat

SEQ ID NO: 3324 - DNA, 26 bp, Unknown
  Description of Unknown: gRNA target site sequence
atatactttgagagataaagcaagat

SEQ ID NO: 3325 - DNA, 26 bp, Unknown
  Description of Unknown: gRNA target site sequence
aagtatttaaatttcctaaagtaaat

SEQ ID NO: 3326 - DNA, 26 bp, Unknown
  Description of Unknown: gRNA target site sequence
caaaaatttgaacacaatattcaaat

SEQ ID NO: 3327 - DNA, 26 bp, Unknown
  Description of Unknown: gRNA target site sequence
ggtattggtggtagaagaggtagaat

SEQ ID NO: 3328 - DNA, 26 bp, Unknown
  Description of Unknown: gRNA target site sequence
ttcagtttatttcttgtgattttagt

SEQ ID NO: 3329 - DNA, 26 bp, Unknown
  Description of Unknown: gRNA target site sequence
acctgggtttcatttgtttcagcagt

SEQ ID NO: 3330 - DNA, 26 bp, Unknown
  Description of Unknown: gRNA target site sequence
aatgttcatgtgcttctgagcagggt

SEQ ID NO: 3331 - DNA, 26 bp, Unknown
  Description of Unknown: gRNA target site sequence
ctgtgattttgatgttaaatggcaat

SEQ ID NO: 3332 - DNA, 26 bp, Unknown
  Description of Unknown: gRNA target site sequence
cagaatgactaatattttagatgaat

SEQ ID NO: 3333 - DNA, 26 bp, Unknown
  Description of Unknown: gRNA target site sequence
aatgccttctttacttaattcaaggt

SEQ ID NO: 3334 - DNA, 26 bp, Unknown
  Description of Unknown: gRNA target site sequence
ggaagtagagcaaaacctttcaggat

SEQ ID NO: 3335 - DNA, 26 bp, Unknown
  Description of Unknown: gRNA target site sequence
aataaatgaagaggaaggacagtggt

SEQ ID NO: 3336 - DNA, 26 bp, Unknown
  Description of Unknown: gRNA target site sequence
agttcatgaaccacaagtaaaagagt

SEQ ID NO: 3337 - DNA, 26 bp, Unknown
  Description of Unknown: gRNA target site sequence
gttttggagttgtcaatgaaatgaat

SEQ ID NO: 3338 - DNA, 26 bp, Unknown
  Description of Unknown: gRNA target site sequence
gagttaaaaacacaagcagtgttaat

SEQ ID NO: 3339 - DNA, 26 bp, Unknown
  Description of Unknown: gRNA target site sequence
catggaaaagccaaagggaactcagt

SEQ ID NO: 3340 - DNA, 26 bp, Unknown
  Description of Unknown: gRNA target site sequence
tcaaacacatttcaaagcttcaggat

SEQ ID NO: 3341 - DNA, 26 bp, Unknown
  Description of Unknown: gRNA target site sequence
ccaggcaaagccactgaggtccgggt

SEQ ID NO: 3342 - DNA, 26 bp, Unknown
  Description of Unknown: gRNA target site sequence
tttaaaaaaaattgacttaagcaaat

SEQ ID NO: 3343 - DNA, 26 bp, Unknown
  Description of Unknown: gRNA target site sequence
catctctgataggcagaggtgagggt

SEQ ID NO: 3344 - DNA, 26 bp, Unknown
  Description of Unknown: gRNA target site sequence
ttagccaattatttaaaaataaaagt

SEQ ID NO: 3345 - DNA, 26 bp, Unknown
  Description of Unknown: gRNA target site sequence
tgttctttctgaagctttctcaaagt

SEQ ID NO: 3346 - DNA, 26 bp, Unknown
  Description of Unknown: gRNA target site sequence
atgaatatttcttctccagtaaaaat

SEQ ID NO: 3347 - DNA, 26 bp, Unknown
  Description of Unknown: gRNA target site sequence
atagcattctgactgtaaaataaaat

SEQ ID NO: 3348 - DNA, 26 bp, Unknown
  Description of Unknown: gRNA target site sequence
ggaggaagtcagaatctgggcacggt

SEQ ID NO: 3349 - DNA, 26 bp, Unknown
  Description of Unknown: gRNA target site sequence
aagcttagagtcaatacaataaagat

SEQ ID NO: 3350 - DNA, 26 bp, Unknown
  Description of Unknown: gRNA target site sequence
aaggatccagaggaggaagtcagaat

SEQ ID NO: 3351 - DNA, 26 bp, Unknown
  Description of Unknown: gRNA target site sequence
aagtaggtactcaaaagatatttgat

SEQ ID NO: 3352 - DNA, 26 bp, Unknown
  Description of Unknown: gRNA target site sequence
aaccacaagtaaaagagtgaggagat

SEQ ID NO: 3353 - DNA, 26 bp, Unknown
  Description of Unknown: gRNA target site sequence
catctctctttaatataaagttggat

SEQ ID NO: 3354 - DNA, 26 bp, Unknown
  Description of Unknown: gRNA target site sequence
tgctcaccaattacataaatctgggt

SEQ ID NO: 3355 - DNA, 26 bp, Unknown
  Description of Unknown: gRNA target site sequence
cctatcttccattcaaggcaaatgat

SEQ ID NO: 3356 - DNA, 26 bp, Unknown
  Description of Unknown: gRNA target site sequence
aagaatctatttctcagtaagaaaat

SEQ ID NO: 3357 - DNA, 26 bp, Unknown
  Description of Unknown: gRNA target site sequence
taggtactcaaaagatatttgatgat

SEQ ID NO: 3358 - DNA, 26 bp, Unknown
  Description of Unknown: gRNA target site sequence
gataactaagtggagacttggagaat

SEQ ID NO: 3359 - DNA, 26 bp, Unknown
  Description of Unknown: gRNA target site sequence
atgaagagaagaaaaaacaggagagt

SEQ ID NO: 3360 - DNA, 26 bp, Unknown
  Description of Unknown: gRNA target site sequence
tttaaataattggctaattagctagt

SEQ ID NO: 3361 - DNA, 26 bp, Unknown
  Description of Unknown: gRNA target site sequence
gatgttgagtttagtgttcttgagat

SEQ ID NO: 3362 - DNA, 26 bp, Unknown
  Description of Unknown: gRNA target site sequence
gtgttggtattggtggtagaagaggt

SEQ ID NO: 3363 - DNA, 26 bp, Unknown
  Description of Unknown: gRNA target site sequence
gttatttatctaaaataaattttaat

SEQ ID NO: 3364 - DNA, 26 bp, Unknown
  Description of Unknown: gRNA target site sequence
atgaattggactggatggttaaggat

SEQ ID NO: 3365 - DNA, 26 bp, Unknown
  Description of Unknown: gRNA target site sequence
acagatagaatacagtttttattaat

SEQ ID NO: 3366 - DNA, 26 bp, Unknown
  Description of Unknown: gRNA target site sequence
tctctgaagagctgaaaactgaggat

SEQ ID NO: 3367 - DNA, 26 bp, Unknown
  Description of Unknown: gRNA target site sequence
gcatcaagacacagctactcctgggt

SEQ ID NO: 3368 - DNA, 26 bp, Unknown
  Description of Unknown: gRNA target site sequence
caactttatattaaagagagatgaat

SEQ ID NO: 3369 - DNA, 26 bp, Unknown
  Description of Unknown: gRNA target site sequence
ttgaatattgtgttcaaatttttgat

SEQ ID NO: 3370 - DNA, 26 bp, Unknown
  Description of Unknown: gRNA target site sequence
agctctaatgtccttttttcaccaat

SEQ ID NO: 3371 - DNA, 26 bp, Unknown
  Description of Unknown: gRNA target site sequence
aaaaaaatgaaggacatgggggaagt

SEQ ID NO: 3372 - DNA, 26 bp, Unknown
  Description of Unknown: gRNA target site sequence
aatacaataaataacattcaatgagt

SEQ ID NO: 3373 - DNA, 26 bp, Unknown
  Description of Unknown: gRNA target site sequence
tggagagggacatggagaaggagaat

SEQ ID NO: 3374 - DNA, 26 bp, Unknown
  Description of Unknown: gRNA target site sequence
caaaatcacagttatttatctaaaat

SEQ ID NO: 3375 - DNA, 26 bp, Unknown
  Description of Unknown: gRNA target site sequence
aggtatccatcctctttccttttgat

SEQ ID NO: 3376 - DNA, 26 bp, Unknown
  Description of Unknown: gRNA target site sequence
agtcccagtttttatttatcacaggt

SEQ ID NO: 3377 - DNA, 26 bp, Unknown
  Description of Unknown: gRNA target site sequence
aactttaatacagagcagaaagtaat

SEQ ID NO: 3378 - DNA, 26 bp, Unknown
  Description of Unknown: gRNA target site sequence
atacagaattataaacctcaggagat

SEQ ID NO: 3379 - DNA, 26 bp, Unknown
  Description of Unknown: gRNA target site sequence
ccccaaatgcacaaacaaataaaaat

SEQ ID NO: 3380 - DNA, 26 bp, Unknown
  Description of Unknown: gRNA target site sequence
ttttttcacatatagtaagagataat

SEQ ID NO: 3381 - DNA, 26 bp, Unknown
  Description of Unknown: gRNA target site sequence
cagaagaaggcagcaggtggcagaat

SEQ ID NO: 3382 - DNA, 26 bp, Unknown
  Description of Unknown: gRNA target site sequence
tgagaaaccattatgaagaagagagt

SEQ ID NO: 3383 - DNA, 26 bp, Unknown
  Description of Unknown: gRNA target site sequence
agctgtcaaacacaaaaagaaacagt

SEQ ID NO: 3384 - DNA, 26 bp, Unknown
  Description of Unknown: gRNA target site sequence
tcctgtcaggatttctttttgacagt

SEQ ID NO: 3385 - DNA, 26 bp, Unknown
  Description of Unknown: gRNA target site sequence
gagagggagaagggagagtttgtaat

SEQ ID NO: 3386 - DNA, 26 bp, Unknown
  Description of Unknown: gRNA target site sequence
tgtctttctactcctttgctttaaat

SEQ ID NO: 3387 - DNA, 26 bp, Unknown
  Description of Unknown: gRNA target site sequence
ttgccatttaacatcaaaatcacagt

SEQ ID NO: 3388 - DNA, 26 bp, Unknown
  Description of Unknown: gRNA target site sequence
tcaaatttttgattgattcattcagt

SEQ ID NO: 3389 - DNA, 26 bp, Unknown
  Description of Unknown: gRNA target site sequence
gcaacaacatgtataatatttttaat

SEQ ID NO: 3390 - DNA, 26 bp, Unknown
  Description of Unknown: gRNA target site sequence
tgtaaaataaaatgatttggggaagt

SEQ ID NO: 3391 - DNA, 26 bp, Unknown
  Description of Unknown: gRNA target site sequence
cagaagacctggctctaccatgaaat

SEQ ID NO: 3392 - DNA, 26 bp, Unknown
  Description of Unknown: gRNA target site sequence
gccttctgtgtgtgcacatgtgtaat

SEQ ID NO: 3393 - DNA, 26 bp, Unknown
  Description of Unknown: gRNA target site sequence
aaaagagaacaaaggagcatgggagt

SEQ ID NO: 3394 - DNA, 26 bp, Unknown
  Description of Unknown: gRNA target site sequence
actgctgaaacaaatgaaacccaggt

SEQ ID NO: 3395 - DNA, 26 bp, Unknown
  Description of Unknown: gRNA target site sequence
agaaggagaataaagaccatccaagt

SEQ ID NO: 3396 - DNA, 26 bp, Unknown
  Description of Unknown: gRNA target site sequence
tgtttatattcaaaccattaacaaat

SEQ ID NO: 3397 - DNA, 26 bp, Unknown
  Description of Unknown: gRNA target site sequence
ggtgctgatggtgcaccatgtctgat

SEQ ID NO: 3398 - DNA, 26 bp, Unknown
  Description of Unknown: gRNA target site sequence
cttttatttttaaataattggctaat

SEQ ID NO: 3399 - DNA, 26 bp, Unknown
  Description of Unknown: gRNA target site sequence
agctaattagccaattatttaaaaat

SEQ ID NO: 3400 - DNA, 26 bp, Unknown
  Description of Unknown: gRNA target site sequence
atatatatatattttaatttgatagt

SEQ ID NO: 3401 - DNA, 26 bp, Unknown
  Description of Unknown: gRNA target site sequence
acactgatcgcaaaaacaaatacaat

SEQ ID NO: 3402 - DNA, 26 bp, Unknown
  Description of Unknown: gRNA target site sequence
tgtcaaacacaaaaagaaacagtaat

SEQ ID NO: 3403 - DNA, 26 bp, Unknown
  Description of Unknown: gRNA target site sequence
gcttccaaatgaactattttgcaaat

SEQ ID NO: 3404 - DNA, 26 bp, Unknown
  Description of Unknown: gRNA target site sequence
ttgcattttcatggaaaatattgagt

SEQ ID NO: 3405 - DNA, 26 bp, Unknown
  Description of Unknown: gRNA target site sequence
aaaaggacaaataatgcttcatgagt

SEQ ID NO: 3406 - DNA, 26 bp, Unknown
  Description of Unknown: gRNA target site sequence
tttaactcaatattttccatgaaaat

SEQ ID NO: 3407 - DNA, 26 bp, Unknown
  Description of Unknown: gRNA target site sequence
ttgtggtttttcagtttgtttccagt

SEQ ID NO: 3408 - DNA, 26 bp, Unknown
  Description of Unknown: gRNA target site sequence
tttgattgattcattcagtatctggt

SEQ ID NO: 3409 - DNA, 26 bp, Unknown
  Description of Unknown: gRNA target site sequence
aatattgagttaaaaacacaagcagt

SEQ ID NO: 3410 - DNA, 26 bp, Unknown
  Description of Unknown: gRNA target site sequence
ttcagccaggaagtgaaagtcccagt

SEQ ID NO: 3411 - DNA, 26 bp, Unknown
  Description of Unknown: gRNA target site sequence
aggagagtgcagggccaggtcctggt

SEQ ID NO: 3412 - DNA, 26 bp, Unknown
  Description of Unknown: gRNA target site sequence
aaatcattttattttacagtcagaat

SEQ ID NO: 3413 - DNA, 26 bp, Unknown
  Description of Unknown: gRNA target site sequence
cccagaagattgaataaaattgggat

SEQ ID NO: 3414 - DNA, 26 bp, Unknown
  Description of Unknown: gRNA target site sequence
agaaaaaaactaaaatcacaagaaat

SEQ ID NO: 3415 - DNA, 26 bp, Unknown
  Description of Unknown: gRNA target site sequence
atgttttaaatatgtaaagattaaat

SEQ ID NO: 3416 - DNA, 26 bp, Unknown
  Description of Unknown: gRNA target site sequence
gtgttcttgagatgagatgaggcaat

SEQ ID NO: 3417 - DNA, 26 bp, Unknown
  Description of Unknown: gRNA target site sequence
ccagattctgacttcctcctctggat

SEQ ID NO: 3418 - DNA, 26 bp, Unknown
  Description of Unknown: gRNA target site sequence
gaatcaatcaaaaatttgaacacaat

SEQ ID NO: 3419 - DNA, 26 bp, Unknown
  Description of Unknown: gRNA target site sequence
gttgagataaatttactttaggaaat

SEQ ID NO: 3420 - DNA, 26 bp, Unknown
  Description of Unknown: gRNA target site sequence
gcattctgactgtaaaataaaatgat

SEQ ID NO: 3421 - DNA, 26 bp, Unknown
  Description of Unknown: gRNA target site sequence
ggaaattctccaagtctccacttagt

SEQ ID NO: 3422 - DNA, 26 bp, Unknown
  Description of Unknown: gRNA target site sequence
ttccccaaatcattttattttacagt

SEQ ID NO: 3423 - DNA, 26 bp, Unknown
  Description of Unknown: gRNA target site sequence
aacactgcttgtgtttttaactcaat

SEQ ID NO: 3424 - DNA, 26 bp, Unknown
  Description of Unknown: gRNA target site sequence
acgtatgtttttgtgtatttgttaat

SEQ ID NO: 3425 - DNA, 26 bp, Unknown
  Description of Unknown: gRNA target site sequence
tctactcctttgctttaaattgtagt

SEQ ID NO: 3426 - DNA, 26 bp, Unknown
  Description of Unknown: gRNA target site sequence
agaaatcaaaaggaaagaggatggat

SEQ ID NO: 3427 - DNA, 26 bp, Unknown
  Description of Unknown: gRNA target site sequence
atcaaaatggctgcaagggacgtggt

SEQ ID NO: 3428 - DNA, 26 bp, Unknown
  Description of Unknown: gRNA target site sequence
atattgtgttcaaatttttgattgat

SEQ ID NO: 3429 - DNA, 26 bp, Unknown
  Description of Unknown: gRNA target site sequence
ttcagctattaaaatttattttagat

SEQ ID NO: 3430 - DNA, 26 bp, Unknown
  Description of Unknown: gRNA target site sequence
ctgggggtgtggagaggggaaggggt

SEQ ID NO: 3431 - DNA, 26 bp, Unknown
  Description of Unknown: gRNA target site sequence
tgtaatcatacatttgtttaagaaat

SEQ ID NO: 3432 - DNA, 26 bp, Unknown
  Description of Unknown: gRNA target site sequence
tatgtttttgtgtatttgttaatggt

SEQ ID NO: 3433 - DNA, 26 bp, Unknown
  Description of Unknown: gRNA target site sequence
tttggttaagagaaaaaaactaaaat

SEQ ID NO: 3434 - DNA, 26 bp, Unknown
  Description of Unknown: gRNA target site sequence
gagaaccttaaaaccttgaattaagt

SEQ ID NO: 3435 - DNA, 26 bp, Unknown
  Description of Unknown: gRNA target site sequence
tcttcatccctgtcttctgcaaaggt

SEQ ID NO: 3436 - DNA, 26 bp, Unknown
  Description of Unknown: gRNA target site sequence
tatttgtccttttgtggtttttcagt

SEQ ID NO: 3437 - DNA, 26 bp, Unknown
  Description of Unknown: gRNA target site sequence
ttctcttaaccaaatgctaaatggat

SEQ ID NO: 3438 - DNA, 26 bp, Unknown
  Description of Unknown: gRNA target site sequence
ctccagtaaaaattaaatcatcaaat

SEQ ID NO: 3439 - DNA, 26 bp, Unknown
  Description of Unknown: gRNA target site sequence
gaagggagagagggagaagggagagt

SEQ ID NO: 3440 - DNA, 26 bp, Unknown
  Description of Unknown: gRNA target site sequence
gtaaaaataagaaaacatatatgaat

SEQ ID NO: 3441 - DNA, 26 bp, Unknown
  Description of Unknown: gRNA target site sequence
gctattaaaatttattttagataaat

SEQ ID NO: 3442 - DNA, 26 bp, Unknown
  Description of Unknown: gRNA target site sequence
catgttgttgcattttcatggaaaat

SEQ ID NO: 3443 - DNA, 26 bp, Unknown
  Description of Unknown: gRNA target site sequence
ccacagatttttatttaattaaaaat

SEQ ID NO: 3444 - DNA, 26 bp, Unknown
  Description of Unknown: gRNA target site sequence
catgaaatatgtgatttggggcaagt

SEQ ID NO: 3445 - DNA, 26 bp, Unknown
  Description of Unknown: gRNA target site sequence
tgaagcattatttgtccttttgtggt

SEQ ID NO: 3446 - DNA, 26 bp, Unknown
  Description of Unknown: gRNA target site sequence
ataaatttactttaggaaatttaaat

SEQ ID NO: 3447 - DNA, 26 bp, Unknown
  Description of Unknown: gRNA target site sequence
ggcattaaccacatgtttgtaagaat

SEQ ID NO: 3448 - DNA, 26 bp, Unknown
  Description of Unknown: gRNA target site sequence
ctaattcatttataaagtatatgaat

SEQ ID NO: 3449 - DNA, 26 bp, Unknown
  Description of Unknown: gRNA target site sequence
ttttatttcttaaacaaatgtatgat

SEQ ID NO: 3450 - DNA, 26 bp, Unknown
  Description of Unknown: gRNA target site sequence
aacatgtataatatttttaattaaat

SEQ ID NO: 3451 - DNA, 26 bp, Unknown
  Description of Unknown: gRNA target site sequence
tgagctccaccttgcagatgtagagt

SEQ ID NO: 3452 - DNA, 26 bp, Unknown
  Description of Unknown: gRNA target site sequence
gatagaatacagtttttattaatgat

SEQ ID NO: 3453 - DNA, 26 bp, Unknown
  Description of Unknown: gRNA target site sequence
taggaaatttaaatacttctaagagt

SEQ ID NO: 3454 - DNA, 26 bp, Unknown
  Description of Unknown: gRNA target site sequence
tttacatatttaaaacatgtaaaaat

SEQ ID NO: 3455 - DNA, 26 bp, Unknown
  Description of Unknown: gRNA target site sequence
gcaatttcaaacttttatttttaaat

SEQ ID NO: 3456 - DNA, 26 bp, Unknown
  Description of Unknown: gRNA target site sequence
ttgtatgaagtaggtactcaaaagat

SEQ ID NO: 3457 - DNA, 26 bp, Unknown
  Description of Unknown: gRNA target site sequence
gtgaagaaatcaaaaggaaagaggat

SEQ ID NO: 3458 - DNA, 26 bp, Unknown
  Description of Unknown: gRNA target site sequence
tttacatgttttaaatatgtaaagat

SEQ ID NO: 3459 - DNA, 26 bp, Unknown
  Description of Unknown: gRNA target site sequence
ttatgccttttatttcttaaacaaat

SEQ ID NO: 3460 - DNA, 26 bp, Unknown
  Description of Unknown: gRNA target site sequence
tctaaaataaattttaatagctgaat

SEQ ID NO: 3461 - DNA, 26 bp, Unknown
  Description of Unknown: gRNA target site sequence
actcaaaagatatttgatgatttaat

SEQ ID NO: 3462 - DNA, 26 bp, Unknown
  Description of Unknown: gRNA target site sequence
tacaaataagtttatttctcctaaat

SEQ ID NO: 3463 - DNA, 26 bp, Unknown
  Description of Unknown: gRNA target site sequence
ttttagtttttttctcttaaccaaat

SEQ ID NO: 3464 - DNA, 26 bp, Unknown
  Description of Unknown: gRNA target site sequence
aaaaggaaagaaagaaagccaccagt

SEQ ID NO: 3465 - DNA, 26 bp, Unknown
  Description of Unknown: gRNA target site sequence
aaacatgagattaggctgggcagaat

SEQ ID NO: 3466 - DNA, 26 bp, Unknown
  Description of Unknown: gRNA target site sequence
ggcaataaatgaagaggaaggacagt

SEQ ID NO: 3467 - DNA, 26 bp, Unknown
  Description of Unknown: gRNA target site sequence
aacaaatacaataaataacattcaat

SEQ ID NO: 3468 - DNA, 26 bp, Unknown
  Description of Unknown: gRNA target site sequence
ataaagatattttcttactgagaaat

SEQ ID NO: 3469 - DNA, 26 bp, Unknown
  Description of Unknown: gRNA target site sequence
aaaatcacaagaaataaactgaaaat

SEQ ID NO: 3470 - DNA, 26 bp, Unknown
  Description of Unknown: gRNA target site sequence
atttcaaacttttatttttaaataat

SEQ ID NO: 3471 - DNA, 26 bp, Unknown
  Description of Unknown: gRNA target site sequence
ttaattaaataaaaatctgtggtggt

SEQ ID NO: 3472 - DNA, 26 bp, Unknown
  Description of Unknown: gRNA target site sequence
gggctataatcactgctcacaggagt

SEQ ID NO: 3473 - DNA, 26 bp, Unknown
  Description of Unknown: gRNA target site sequence
caagaaaatctcctgaggtttataat

SEQ ID NO: 3474 - DNA, 26 bp, Unknown
  Description of Unknown: gRNA target site sequence
gctctgctttgttttctgttgcagat

SEQ ID NO: 3475 - DNA, 26 bp, Unknown
  Description of Unknown: gRNA target site sequence
ttatttattgtatttgtttttgcgat

SEQ ID NO: 3476 - DNA, 26 bp, Unknown
  Description of Unknown: gRNA target site sequence
tttttaattaaataaaaatctgtggt

SEQ ID NO: 3477 - DNA, 26 bp, Unknown
  Description of Unknown: gRNA target site sequence
gggtgtggagaggggaaggggtaagt

SEQ ID NO: 3478 - DNA, 26 bp, Unknown
  Description of Unknown: gRNA target site sequence
gcacaaacaaataaaaatagctggat

SEQ ID NO: 3479 - DNA, 26 bp, Unknown
  Description of Unknown: gRNA target site sequence
gatttaatttttactggagaagaaat

SEQ ID NO: 3480 - DNA, 26 bp, Unknown
  Description of Unknown: gRNA target site sequence
tataatatttttaattaaataaaaat

SEQ ID NO: 3481 - DNA, 26 bp, Unknown
  Description of Unknown: gRNA target site sequence
tgtttaagaaataaaaggcataaaat

SEQ ID NO: 3482 - DNA, 26 bp, Unknown
  Description of Unknown: gRNA target site sequence
aattttaatagctgaatcaagaaaat

SEQ ID NO: 3483 - DNA, 26 bp, Unknown
  Description of Unknown: gRNA target site sequence
attatttaaaaataaaagtttgaaat

SEQ ID NO: 3484 - DNA, 26 bp, Unknown
  Description of Unknown: gRNA target site sequence
tttccttgtcttttttttttggcaat

SEQ ID NO: 3485 - DNA, 26 bp, Unknown
  Description of Unknown: gRNA target site sequence
tatatatatatatattttaatttgat

SEQ ID NO: 3486 - DNA, 26 bp, Unknown
  Description of Unknown: gRNA target site sequence
tatatatatatatgtatatatgcaat

SEQ ID NO: 3487 - DNA, 26 bp, Unknown
  Description of Unknown: gRNA target site sequence
atatatatatatatatatattttaat

SEQ ID NO: 3488 - DNA, 27 bp, Unknown
  Description of Unknown: gRNA target site sequence
cctgccattagcccaagggctcagaaa

SEQ ID NO: 3489 - DNA, 27 bp, Unknown
  Description of Unknown: gRNA target site sequence
ctgaaagtggagctgatgtgacagaaa

SEQ ID NO: 3490 - DNA, 27 bp, Unknown
  Description of Unknown: gRNA target site sequence
agaaggatggtgcttcacagatagaat

SEQ ID NO: 3491 - DNA, 27 bp, Unknown
  Description of Unknown: gRNA target site sequence
tctctctagaccttcttggttaagaaa

SEQ ID NO: 3492 - DNA, 27 bp, Unknown
  Description of Unknown: gRNA target site sequence
aggcattggcatttgaggtttcagaat

SEQ ID NO: 3493 - DNA, 27 bp, Unknown
  Description of Unknown: gRNA target site sequence
aagattctgtacctcaaccttcagaat

SEQ ID NO: 3494 - DNA, 27 bp, Unknown
  Description of Unknown: gRNA target site sequence
tattgtattgactctaagcttaagaaa

SEQ ID NO: 3495 - DNA, 27 bp, Unknown
  Description of Unknown: gRNA target site sequence
tgtctgagagggactgtcaaaaagaaa

SEQ ID NO: 3496 - DNA, 27 bp, Unknown
  Description of Unknown: gRNA target site sequence
acgggacatctgtcctcagaagagaaa

SEQ ID NO: 3497 - DNA, 27 bp, Unknown
  Description of Unknown: gRNA target site sequence
atctggtggagtctccaatattagaaa

SEQ ID NO: 3498 - DNA, 27 bp, Unknown
  Description of Unknown: gRNA target site sequence
tgaaaatgcccccaacagagccagaat

SEQ ID NO: 3499 - DNA, 27 bp, Unknown
  Description of Unknown: gRNA target site sequence
gaaagaggatggataccttccaagaat

SEQ ID NO: 3500 - DNA, 27 bp, Unknown
  Description of Unknown: gRNA target site sequence
tgaaatgtgtttgaacccacacagaat

SEQ ID NO: 3501 - DNA, 27 bp, Unknown
  Description of Unknown: gRNA target site sequence
gttatatcccaaatagtggtgaagaaa

SEQ ID NO: 3502 - DNA, 27 bp, Unknown
  Description of Unknown: gRNA target site sequence
aatgcctgtgatagttgagctgagaaa

SEQ ID NO: 3503 - DNA, 27 bp, Unknown
  Description of Unknown: gRNA target site sequence
cacacacagaaggcacttgaatagaaa

SEQ ID NO: 3504 - DNA, 27 bp, Unknown
  Description of Unknown: gRNA target site sequence
cctatcattctatcataaccttagaat

SEQ ID NO: 3505 - DNA, 27 bp, Unknown
  Description of Unknown: gRNA target site sequence
tggcattaaccacatgtttgtaagaat

SEQ ID NO: 3506 - DNA, 27 bp, Unknown
  Description of Unknown: gRNA target site sequence
tgagctgagaaagcaggcggtaagaaa

SEQ ID NO: 3507 - DNA, 27 bp, Unknown
  Description of Unknown: gRNA target site sequence
ggcacggttctggatctgcaacagaaa

SEQ ID NO: 3508 - DNA, 27 bp, Unknown
  Description of Unknown: gRNA target site sequence
ggataactaagtggagacttggagaat

SEQ ID NO: 3509 - DNA, 27 bp, Unknown
  Description of Unknown: gRNA target site sequence
atgtggtacagaactcttaaagagaat

SEQ ID NO: 3510 - DNA, 27 bp, Unknown
  Description of Unknown: gRNA target site sequence
tgtaggttcagcagtggggatgagaaa

SEQ ID NO: 3511 - DNA, 27 bp, Unknown
  Description of Unknown: gRNA target site sequence
tgatagattcgttgaaggggggagaaa

SEQ ID NO: 3512 - DNA, 27 bp, Unknown
  Description of Unknown: gRNA target site sequence
ccacactcaccattttgctcaaagaaa

SEQ ID NO: 3513 - DNA, 27 bp, Unknown
  Description of Unknown: gRNA target site sequence
gaaacatgagattaggctgggcagaat

SEQ ID NO: 3514 - DNA, 27 bp, Unknown
  Description of Unknown: gRNA target site sequence
cttcctgccacaaccatcttgaagaat

SEQ ID NO: 3515 - DNA, 27 bp, Unknown
  Description of Unknown: gRNA target site sequence
catgggagtgttcaagggaaggagaaa

SEQ ID NO: 3516 - DNA, 27 bp, Unknown
  Description of Unknown: gRNA target site sequence
tctggtattctaaggttatgatagaat

SEQ ID NO: 3517 - DNA, 27 bp, Unknown
  Description of Unknown: gRNA target site sequence
aataattggctaattagctagtagaat

SEQ ID NO: 3518 - DNA, 27 bp, Unknown
  Description of Unknown: gRNA target site sequence
tttgccttgaatggaagataggagaaa

SEQ ID NO: 3519 - DNA, 27 bp, Unknown
  Description of Unknown: gRNA target site sequence
atccatttagcatttggttaagagaaa

SEQ ID NO: 3520 - DNA, 27 bp, Unknown
  Description of Unknown: gRNA target site sequence
ccaaatgctaaatggatttaggagaaa

SEQ ID NO: 3521 - DNA, 27 bp, Unknown
  Description of Unknown: gRNA target site sequence
tataagcaggaaagtgtgtcctagaaa

SEQ ID NO: 3522 - DNA, 27 bp, Unknown
  Description of Unknown: gRNA target site sequence
aaaatgtagggaaattgtgggaagaat

SEQ ID NO: 3523 - DNA, 27 bp, Unknown
  Description of Unknown: gRNA target site sequence
acagaagaaggcagcaggtggcagaat

SEQ ID NO: 3524 - DNA, 27 bp, Unknown
  Description of Unknown: gRNA target site sequence
gaaattctgaaggttgaggtacagaat

SEQ ID NO: 3525 - DNA, 27 bp, Unknown
  Description of Unknown: gRNA target site sequence
tggtattggtggtagaagaggtagaat

SEQ ID NO: 3526 - DNA, 27 bp, Unknown
  Description of Unknown: gRNA target site sequence
tctttagctgtcaaacacaaaaagaaa

SEQ ID NO: 3527 - DNA, 27 bp, Unknown
  Description of Unknown: gRNA target site sequence
gctcaaagaaacagctgtgaggagaaa

SEQ ID NO: 3528 - DNA, 27 bp, Unknown
  Description of Unknown: gRNA target site sequence
ttgaagaatctatttctcagtaagaaa

SEQ ID NO: 3529 - DNA, 27 bp, Unknown
  Description of Unknown: gRNA target site sequence
aacacaagcagtgttaattttcagaaa

SEQ ID NO: 3530 - DNA, 27 bp, Unknown
  Description of Unknown: gRNA target site sequence
cttattttattcccatcaattgagaaa

SEQ ID NO: 3531 - DNA, 27 bp, Unknown
  Description of Unknown: gRNA target site sequence
tctttttgtgtttgacagctaaagaaa

SEQ ID NO: 3532 - DNA, 27 bp, Unknown
  Description of Unknown: gRNA target site sequence
aaacaaatgaaacccaggtaggagaaa

SEQ ID NO: 3533 - DNA, 27 bp, Unknown
  Description of Unknown: gRNA target site sequence
ccataaagatattttcttactgagaaa

SEQ ID NO: 3534 - DNA, 27 bp, Unknown
  Description of Unknown: gRNA target site sequence
gaaagcttcagaaagaacacccagaaa

SEQ ID NO: 3535 - DNA, 27 bp, Unknown
  Description of Unknown: gRNA target site sequence
atgatttaatttttactggagaagaaa

SEQ ID NO: 3536 - DNA, 27 bp, Unknown
  Description of Unknown: gRNA target site sequence
gatgtaatcatacatttgtttaagaaa

SEQ ID NO: 3537 - DNA, 27 bp, Unknown
  Description of Unknown: gRNA target site sequence
caaggatccagaggaggaagtcagaat

SEQ ID NO: 3538 - DNA, 27 bp, Unknown
  Description of Unknown: gRNA target site sequence
aagataggagaaagagactttgagaaa

SEQ ID NO: 3539 - DNA, 27 bp, Unknown
  Description of Unknown: gRNA target site sequence
aaagagactttgagaaagcttcagaaa

SEQ ID NO: 3540 - DNA, 27 bp, Unknown
  Description of Unknown: gRNA target site sequence
ctacaatttaaagcaaaggagtagaaa

SEQ ID NO: 3541 - DNA, 27 bp, Unknown
  Description of Unknown: gRNA target site sequence
acaaataactttaatacagagcagaaa

SEQ ID NO: 3542 - DNA, 27 bp, Unknown
  Description of Unknown: gRNA target site sequence
atagctggatagcaaaaaagttagaat

SEQ ID NO: 3543 - DNA, 27 bp, Unknown
  Description of Unknown: gRNA target site sequence
ataaattttaatagctgaatcaagaaa

SEQ ID NO: 3544 - DNA, 27 bp, Unknown
  Description of Unknown: gRNA target site sequence
caaatcattttattttacagtcagaat

SEQ ID NO: 3545 - DNA, 27 bp, Unknown
  Description of Unknown: gRNA target site sequence
aaaatgaatgttcacagcatacagaat

SEQ ID NO: 3546 - DNA, 27 bp, Unknown
  Description of Unknown: gRNA target site sequence
gcagaagacagggatgaagagaagaaa

SEQ ID NO: 3547 - DNA, 27 bp, Unknown
  Description of Unknown: gRNA target site sequence
gcctttttgttttggttttacgagaaa

SEQ ID NO: 3548 - DNA, 27 bp, Unknown
  Description of Unknown: gRNA target site sequence
atggagagggacatggagaaggagaat

SEQ ID NO: 3549 - DNA, 27 bp, Unknown
  Description of Unknown: gRNA target site sequence
agagaaaaaaactaaaatcacaagaaa

SEQ ID NO: 3550 - DNA, 27 bp, Unknown
  Description of Unknown: gRNA target site sequence
atatttaaaacatgtaaaaataagaaa

SEQ ID NO: 3551 - DNA, 27 bp, Unknown
  Description of Unknown: gRNA target site sequence
tgtgtataagagacagagagggagaaa

SEQ ID NO: 3552 - DNA, 27 bp, Unknown
  Description of Unknown: gRNA target site sequence
aaagacaaggaaaaggaaagaaagaaa

SEQ ID NO: 3553 - DNA, 27 bp, Unknown
  Description of Unknown: gRNA target site sequence
aaaaaaagacaaggaaaaggaaagaaa

SEQ ID NO: 3554 - DNA, 27 bp, Unknown
  Description of Unknown: gRNA target site sequence
agagagggagaaagagagagagagaaa

SEQ ID NO: 3555 - DNA, 28 bp, Unknown
  Description of Unknown: gRNA target site sequence
caactccggaaaacgaccaccacagatt

SEQ ID NO: 3556 - DNA, 28 bp, Unknown
  Description of Unknown: gRNA target site sequence
gtccttggatagtgaggttcacttgatt

SEQ ID NO: 3557 - DNA, 28 bp, Unknown
  Description of Unknown: gRNA target site sequence
actttcagtgaaagcatcacttgggatt

SEQ ID NO: 3558 - DNA, 28 bp, Unknown
  Description of Unknown: gRNA target site sequence
taagcttagagtcaatacaataaagatt

SEQ ID NO: 3559 - DNA, 28 bp, Unknown
  Description of Unknown: gRNA target site sequence
agacccttctatgagactggaagtgatt

SEQ ID NO: 3560 - DNA, 28 bp, Unknown
  Description of Unknown: gRNA target site sequence
gggaatgagttgaccttcctagatgatt

SEQ ID NO: 3561 - DNA, 28 bp, Unknown
  Description of Unknown: gRNA target site sequence
tcctatcttccattcaaggcaaatgatt

SEQ ID NO: 3562 - DNA, 28 bp, Unknown
  Description of Unknown: gRNA target site sequence
ctagaaattcagaccagagtgatagatt

SEQ ID NO: 3563 - DNA, 28 bp, Unknown
  Description of Unknown: gRNA target site sequence
cctgtgttaaacagcatgccaattgatt

SEQ ID NO: 3564 - DNA, 28 bp, Unknown
  Description of Unknown: gRNA target site sequence
tggaatacagagccagccaagccagatt

SEQ ID NO: 3565 - DNA, 28 bp, Unknown
  Description of Unknown: gRNA target site sequence
ggttcatgaactcctgtgagcagtgatt

SEQ ID NO: 3566 - DNA, 28 bp, Unknown
  Description of Unknown: gRNA target site sequence
tctgagcccttgggctaatggcaggatt

SEQ ID NO: 3567 - DNA, 28 bp, Unknown
  Description of Unknown: gRNA target site sequence
ctggatggttaaggatgcccagaagatt

SEQ ID NO: 3568 - DNA, 28 bp, Unknown
  Description of Unknown: gRNA target site sequence
acctggctctaccatgaaatatgtgatt

SEQ ID NO: 3569 - DNA, 28 bp, Unknown
  Description of Unknown: gRNA target site sequence
catacagaattataaacctcaggagatt

SEQ ID NO: 3570 - DNA, 28 bp, Unknown
  Description of Unknown: gRNA target site sequence
attggctaattagctagtagaattgatt

SEQ ID NO: 3571 - DNA, 28 bp, Unknown
  Description of Unknown: gRNA target site sequence
tcaagcttgttcccttgcagacaagatt

SEQ ID NO: 3572 - DNA, 28 bp, Unknown
  Description of Unknown: gRNA target site sequence
cccataaagccatggcttgccttggatt

SEQ ID NO: 3573 - DNA, 28 bp, Unknown
  Description of Unknown: gRNA target site sequence
aaggtatccatcctctttccttttgatt

SEQ ID NO: 3574 - DNA, 28 bp, Unknown
  Description of Unknown: gRNA target site sequence
cctgggcataggcaacggaacccagatt

SEQ ID NO: 3575 - DNA, 28 bp, Unknown
  Description of Unknown: gRNA target site sequence
taagctaacagccctgaaacatgagatt

SEQ ID NO: 3576 - DNA, 28 bp, Unknown
  Description of Unknown: gRNA target site sequence
ttatggaatcaggcctcctgtcaggatt

SEQ ID NO: 3577 - DNA, 28 bp, Unknown
  Description of Unknown: gRNA target site sequence
gttgcagatccagaaccgtgcccagatt

SEQ ID NO: 3578 - DNA, 28 bp, Unknown
  Description of Unknown: gRNA target site sequence
tcagtgttagtaaagtgtcaaagggatt

SEQ ID NO: 3579 - DNA, 28 bp, Unknown
  Description of Unknown: gRNA target site sequence
caattcaaggttttaaggtcctcggatt

SEQ ID NO: 3580 - DNA, 28 bp, Unknown
  Description of Unknown: gRNA target site sequence
ctggatgaggtcatagcagtgcttgatt

SEQ ID NO: 3581 - DNA, 28 bp, Unknown
  Description of Unknown: gRNA target site sequence
tttgtttcagcagtcaaaggcagtgatt

SEQ ID NO: 3582 - DNA, 28 bp, Unknown
  Description of Unknown: gRNA target site sequence
ttggggagagggcaggacatttaggatt

SEQ ID NO: 3583 - DNA, 28 bp, Unknown
  Description of Unknown: gRNA target site sequence
gtatagcaaaaaaactcttcccaggatt

SEQ ID NO: 3584 - DNA, 28 bp, Unknown
  Description of Unknown: gRNA target site sequence
aaaagaaatcctgacaggaggcctgatt

SEQ ID NO: 3585 - DNA, 28 bp, Unknown
  Description of Unknown: gRNA target site sequence
ggagaggggaaggggtaagtgatagatt

SEQ ID NO: 3586 - DNA, 28 bp, Unknown
  Description of Unknown: gRNA target site sequence
ggactagtgtctctaatatagggtgatt

SEQ ID NO: 3587 - DNA, 28 bp, Unknown
  Description of Unknown: gRNA target site sequence
aggtctagagagagataaggttgagatt

SEQ ID NO: 3588 - DNA, 28 bp, Unknown
  Description of Unknown: gRNA target site sequence
gcccagaagattgaataaaattgggatt

SEQ ID NO: 3589 - DNA, 28 bp, Unknown
  Description of Unknown: gRNA target site sequence
ttataaacctcaggagattttcttgatt

SEQ ID NO: 3590 - DNA, 28 bp, Unknown
  Description of Unknown: gRNA target site sequence
caaagctatctatataaagtccttgatt

SEQ ID NO: 3591 - DNA, 28 bp, Unknown
  Description of Unknown: gRNA target site sequence
acaagtaaaagagtgaggagatatgatt

SEQ ID NO: 3592 - DNA, 28 bp, Unknown
  Description of Unknown: gRNA target site sequence
agcattctgactgtaaaataaaatgatt

SEQ ID NO: 3593 - DNA, 28 bp, Unknown
  Description of Unknown: gRNA target site sequence
tttctcttaaccaaatgctaaatggatt

SEQ ID NO: 3594 - DNA, 28 bp, Unknown
  Description of Unknown: gRNA target site sequence
aagatattttcttactgagaaatagatt

SEQ ID NO: 3595 - DNA, 28 bp, Unknown
  Description of Unknown: gRNA target site sequence
aattgaatacattttccatccatggatt

SEQ ID NO: 3596 - DNA, 28 bp, Unknown
  Description of Unknown: gRNA target site sequence
catatactttgagagataaagcaagatt

SEQ ID NO: 3597 - DNA, 28 bp, Unknown
  Description of Unknown: gRNA target site sequence
tttgaatattgtgttcaaatttttgatt

SEQ ID NO: 3598 - DNA, 28 bp, Unknown
  Description of Unknown: gRNA target site sequence
ttttacatgttttaaatatgtaaagatt

SEQ ID NO: 3599 - DNA, 28 bp, Unknown
  Description of Unknown: gRNA target site sequence
gtaggtactcaaaagatatttgatgatt

SEQ ID NO: 3600 - DNA, 28 bp, Unknown
  Description of Unknown: gRNA target site sequence
aatattgtgttcaaatttttgattgatt

SEQ ID NO: 3601 - DNA, 28 bp, Unknown
  Description of Unknown: gRNA target site sequence
aatttattttagataaataactgtgatt

SEQ ID NO: 3602 - DNA, 28 bp, Unknown
  Description of Unknown: gRNA target site sequence
cttttatttcttaaacaaatgtatgatt

SEQ ID NO: 3603 - DNA, 26 bp, Unknown
  Description of Unknown: gRNA target site sequence
caacctttagcatcactggctaaaac

SEQ ID NO: 3604 - DNA, 26 bp, Unknown
  Description of Unknown: gRNA target site sequence
ggatgataaagacaactccggaaaac

SEQ ID NO: 3605 - DNA, 26 bp, Unknown
  Description of Unknown: gRNA target site sequence
acccacggcttcctttctcgtaaaac

SEQ ID NO: 3606 - DNA, 26 bp, Unknown
  Description of Unknown: gRNA target site sequence
tatctctcaaagtatatgtcaaaaac

SEQ ID NO: 3607 - DNA, 26 bp, Unknown
  Description of Unknown: gRNA target site sequence
actttactaacactgatcgcaaaaac

SEQ ID NO: 3608 - DNA, 26 bp, Unknown
  Description of Unknown: gRNA target site sequence
cattgcagtcttctatgcacaaaaac

SEQ ID NO: 3609 - DNA, 26 bp, Unknown
  Description of Unknown: gRNA target site sequence
atctttatggagagtagctggaaaac

SEQ ID NO: 3610 - DNA, 26 bp, Unknown
  Description of Unknown: gRNA target site sequence
tttgtctaggcatcattaataaaaac

SEQ ID NO: 3611 - DNA, 26 bp, Unknown
  Description of Unknown: gRNA target site sequence
ggcttcctttctcgtaaaaccaaaac

SEQ ID NO: 3612 - DNA, 26 bp, Unknown
  Description of Unknown: gRNA target site sequence
ggacatctgtcctcagaagagaaaac

SEQ ID NO: 3613 - DNA, 26 bp, Unknown
  Description of Unknown: gRNA target site sequence
caggtcttcaggaagtagagcaaaac

SEQ ID NO: 3614 - DNA, 26 bp, Unknown
  Description of Unknown: gRNA target site sequence
agaattgattaagagaaccttaaaac

SEQ ID NO: 3615 - DNA, 26 bp, Unknown
  Description of Unknown: gRNA target site sequence
gtatatgaatccgaggaccttaaaac

SEQ ID NO: 3616 - DNA, 26 bp, Unknown
  Description of Unknown: gRNA target site sequence
gcaaagccagaagttaaaggtaaaac

SEQ ID NO: 3617 - DNA, 26 bp, Unknown
  Description of Unknown: gRNA target site sequence
tcagtctgacaagtgaaactcaaaac

SEQ ID NO: 3618 - DNA, 26 bp, Unknown
  Description of Unknown: gRNA target site sequence
aactattttgcaaatgtggggaaaac

SEQ ID NO: 3619 - DNA, 26 bp, Unknown
  Description of Unknown: gRNA target site sequence
attcatttcattgacaactccaaaac

SEQ ID NO: 3620 - DNA, 26 bp, Unknown
  Description of Unknown: gRNA target site sequence
gttgtcatgaagacaaagagcaaaac

SEQ ID NO: 3621 - DNA, 26 bp, Unknown
  Description of Unknown: gRNA target site sequence
ctgtgaggagaaagctataaaaaaac

SEQ ID NO: 3622 - DNA, 26 bp, Unknown
  Description of Unknown: gRNA target site sequence
gggagtagagccctagagtttaaaac

SEQ ID NO: 3623 - DNA, 26 bp, Unknown
  Description of Unknown: gRNA target site sequence
tagtgtcctgagctcctccacaaaac

SEQ ID NO: 3624 - DNA, 26 bp, Unknown
  Description of Unknown: gRNA target site sequence
aaccttgaattgtatagcaaaaaaac

SEQ ID NO: 3625 - DNA, 26 bp, Unknown
  Description of Unknown: gRNA target site sequence
taccaacacctgtgataaataaaaac

SEQ ID NO: 3626 - DNA, 26 bp, Unknown
  Description of Unknown: gRNA target site sequence
acctcaagcactcaactgaacaaaac

SEQ ID NO: 3627 - DNA, 26 bp, Unknown
  Description of Unknown: gRNA target site sequence
ttcatggaaaatattgagttaaaaac

SEQ ID NO: 3628 - DNA, 26 bp, Unknown
  Description of Unknown: gRNA target site sequence
gtgtcagtctctgaagagctgaaaac

SEQ ID NO: 3629 - DNA, 26 bp, Unknown
  Description of Unknown: gRNA target site sequence
acggttctggatctgcaacagaaaac

SEQ ID NO: 3630 - DNA, 26 bp, Unknown
  Description of Unknown: gRNA target site sequence
ttcctggctgaaggggaaggcaaaac

SEQ ID NO: 3631 - DNA, 26 bp, Unknown
  Description of Unknown: gRNA target site sequence
ttagcatttggttaagagaaaaaaac

SEQ ID NO: 3632 - DNA, 26 bp, Unknown
  Description of Unknown: gRNA target site sequence
aacctcctgaaattaaggaacaaaac

SEQ ID NO: 3633 - DNA, 26 bp, Unknown
  Description of Unknown: gRNA target site sequence
caaaccattaacaaatacacaaaaac

SEQ ID NO: 3634 - DNA, 26 bp, Unknown
  Description of Unknown: gRNA target site sequence
agacagggatgaagagaagaaaaaac

SEQ ID NO: 3635 - DNA, 26 bp, Unknown
  Description of Unknown: gRNA target site sequence
ttatttaatctttacatatttaaaac

SEQ ID NO: 3636 - DNA, 26 bp, Unknown
  Description of Unknown: gRNA target site sequence
gaaatactggaaacaaactgaaaaac

SEQ ID NO: 3637 - DNA, 26 bp, Unknown
  Description of Unknown: gRNA target site sequence
tttaaaacatgtaaaaataagaaaac

SEQ ID NO: 3638 - DNA, 27 bp, Unknown
  Description of Unknown: gRNA target site sequence
tttcagtttatttcttgtgattttagt

SEQ ID NO: 3639 - DNA, 27 bp, Unknown
  Description of Unknown: gRNA target site sequence
tttatttcttgtgattttagttttttt

SEQ ID NO: 3640 - DNA, 27 bp, Unknown
  Description of Unknown: gRNA target site sequence
tttcttgtgattttagtttttttctct

SEQ ID NO: 3641 - DNA, 27 bp, Unknown
  Description of Unknown: gRNA target site sequence
tttggttaagagaaaaaaactaaaatc

SEQ ID NO: 3642 - DNA, 27 bp, Unknown
  Description of Unknown: gRNA target site sequence
tttagtttttttctcttaaccaaatgc

SEQ ID NO: 3643 - DNA, 27 bp, Unknown
  Description of Unknown: gRNA target site sequence
tttagcatttggttaagagaaaaaaac

SEQ ID NO: 3644 - DNA, 27 bp, Unknown
  Description of Unknown: gRNA target site sequence
tttctcttaaccaaatgctaaatggat

SEQ ID NO: 3645 - DNA, 27 bp, Unknown
  Description of Unknown: gRNA target site sequence
tttctcctaaatccatttagcatttgg

SEQ ID NO: 3646 - DNA, 27 bp, Unknown
  Description of Unknown: gRNA target site sequence
tttatttctcctaaatccatttagcat

SEQ ID NO: 3647 - DNA, 27 bp, Unknown
  Description of Unknown: gRNA target site sequence
tttaggagaaataaacttatttgtaaa

SEQ ID NO: 3648 - DNA, 27 bp, Unknown
  Description of Unknown: gRNA target site sequence
tttacaaataagtttatttctcctaaa

SEQ ID NO: 3649 - DNA, 27 bp, Unknown
  Description of Unknown: gRNA target site sequence
tttgtaaagctgtcaagggaccattag

SEQ ID NO: 3650 - DNA, 27 bp, Unknown
  Description of Unknown: gRNA target site sequence
tttgtctaggcatcattaataaaaact

SEQ ID NO: 3651 - DNA, 27 bp, Unknown
  Description of Unknown: gRNA target site sequence
tttattaatgatgcctagacaaatcct

SEQ ID NO: 3652 - DNA, 27 bp, Unknown
  Description of Unknown: gRNA target site sequence
tttctgagcccttgggctaatggcagg

SEQ ID NO: 3653 - DNA, 27 bp, Unknown
  Description of Unknown: gRNA target site sequence
tttcattgacaactccaaaactactag

SEQ ID NO: 3654 - DNA, 27 bp, Unknown
  Description of Unknown: gRNA target site sequence
ttttggagttgtcaatgaaatgaattg

SEQ ID NO: 3655 - DNA, 27 bp, Unknown
  Description of Unknown: gRNA target site sequence
tttggagttgtcaatgaaatgaattgg

SEQ ID NO: 3656 - DNA, 27 bp, Unknown
  Description of Unknown: gRNA target site sequence
tttattcaatcttctgggcatccttaa

SEQ ID NO: 3657 - DNA, 27 bp, Unknown
  Description of Unknown: gRNA target site sequence
ttttattcaatcttctgggcatcctta

SEQ ID NO: 3658 - DNA, 27 bp, Unknown
  Description of Unknown: gRNA target site sequence
tttaggaggacccttgtactccaggaa

SEQ ID NO: 3659 - DNA, 27 bp, Unknown
  Description of Unknown: gRNA target site sequence
tttcctggagtacaagggtcctcctaa

SEQ ID NO: 3660 - DNA, 27 bp, Unknown
  Description of Unknown: gRNA target site sequence
tttgaggatctggataactaagtggag

SEQ ID NO: 3661 - DNA, 27 bp, Unknown
  Description of Unknown: gRNA target site sequence
tttgaaactgaagcttcatgttcactt

SEQ ID NO: 3662 - DNA, 27 bp, Unknown
  Description of Unknown: gRNA target site sequence
tttcaaattgaatacattttccatcca

SEQ ID NO: 3663 - DNA, 27 bp, Unknown
  Description of Unknown: gRNA target site sequence
ttttccatccatggattggcttgtttt

SEQ ID NO: 3664 - DNA, 27 bp, Unknown
  Description of Unknown: gRNA target site sequence
tttccatccatggattggcttgttttg

SEQ ID NO: 3665 - DNA, 27 bp, Unknown
  Description of Unknown: gRNA target site sequence
ttttgttcagttgagtgcttgaggttg

SEQ ID NO: 3666 - DNA, 27 bp, Unknown
  Description of Unknown: gRNA target site sequence
tttgttcagttgagtgcttgaggttgt

SEQ ID NO: 3667 - DNA, 27 bp, Unknown
  Description of Unknown: gRNA target site sequence
tttagctgttacgtcgaaaagacaacc

SEQ ID NO: 3668 - DNA, 27 bp, Unknown
  Description of Unknown: gRNA target site sequence
ttttcgacgtaacagctaaacccacgg

SEQ ID NO: 3669 - DNA, 27 bp, Unknown
  Description of Unknown: gRNA target site sequence
tttcgacgtaacagctaaacccacggc

SEQ ID NO: 3670 - DNA, 27 bp, Unknown
  Description of Unknown: gRNA target site sequence
tttacgagaaaggaagccgtgggttta

SEQ ID NO: 3671 - DNA, 27 bp, Unknown
  Description of Unknown: gRNA target site sequence
ttttacgagaaaggaagccgtgggttt

SEQ ID NO: 3672 - DNA, 27 bp, Unknown
  Description of Unknown: gRNA target site sequence
tttggttttacgagaaaggaagccgtg

SEQ ID NO: 3673 - DNA, 27 bp, Unknown
  Description of Unknown: gRNA target site sequence
ttttggttttacgagaaaggaagccgt

SEQ ID NO: 3674 - DNA, 27 bp, Unknown
  Description of Unknown: gRNA target site sequence
tttgttttggttttacgagaaaggaag

SEQ ID NO: 3675 - DNA, 27 bp, Unknown
  Description of Unknown: gRNA target site sequence
tttctcgtaaaaccaaaacaaaaaggc

SEQ ID NO: 3676 - DNA, 27 bp, Unknown
  Description of Unknown: gRNA target site sequence
tttctattcaagtgccttctgtgtgtg

SEQ ID NO: 3677 - DNA, 27 bp, Unknown
  Description of Unknown: gRNA target site sequence
tttgatcccagatatgtattacacatg

SEQ ID NO: 3678 - DNA, 27 bp, Unknown
  Description of Unknown: gRNA target site sequence
tttatatagatagctttgatcccagat

SEQ ID NO: 3679 - DNA, 27 bp, Unknown
  Description of Unknown: gRNA target site sequence
tttgaacccacacagaatcaaggactt

SEQ ID NO: 3680 - DNA, 27 bp, Unknown
  Description of Unknown: gRNA target site sequence
tttgaaatgtgtttgaacccacacaga

SEQ ID NO: 3681 - DNA, 27 bp, Unknown
  Description of Unknown: gRNA target site sequence
tttcaggatcctgaagctttgaaatgt

SEQ ID NO: 3682 - DNA, 27 bp, Unknown
  Description of Unknown: gRNA target site sequence
tttcaaagcttcaggatcctgaaaggt

SEQ ID NO: 3683 - DNA, 27 bp, Unknown
  Description of Unknown: gRNA target site sequence
ttttgctctacttcctgaagacctgaa

SEQ ID NO: 3684 - DNA, 27 bp, Unknown
  Description of Unknown: gRNA target site sequence
tttgctctacttcctgaagacctgaac

SEQ ID NO: 3685 - DNA, 27 bp, Unknown
  Description of Unknown: gRNA target site sequence
tttatgggagcggtgttcaggtcttca

SEQ ID NO: 3686 - DNA, 27 bp, Unknown
  Description of Unknown: gRNA target site sequence
tttcagcggcacaaggctcagctgaac

SEQ ID NO: 3687 - DNA, 27 bp, Unknown
  Description of Unknown: gRNA target site sequence
tttcttctcttcatccctgtcttctgc

SEQ ID NO: 3688 - DNA, 27 bp, Unknown
  Description of Unknown: gRNA target site sequence
tttgcagaagacagggatgaagagaag

SEQ ID NO: 3689 - DNA, 27 bp, Unknown
  Description of Unknown: gRNA target site sequence
ttttggagcatgaagatggaggaggtg

SEQ ID NO: 3690 - DNA, 27 bp, Unknown
  Description of Unknown: gRNA target site sequence
tttggagcatgaagatggaggaggtgt

SEQ ID NO: 3691 - DNA, 27 bp, Unknown
  Description of Unknown: gRNA target site sequence
tttctcctacctgggtttcatttgttt

SEQ ID NO: 3692 - DNA, 27 bp, Unknown
  Description of Unknown: gRNA target site sequence
tttgactgctgaaacaaatgaaaccca

SEQ ID NO: 3693 - DNA, 27 bp, Unknown
  Description of Unknown: gRNA target site sequence
tttcatttgtttcagcagtcaaaggca

SEQ ID NO: 3694 - DNA, 27 bp, Unknown
  Description of Unknown: gRNA target site sequence
tttgtttcagcagtcaaaggcagtgat

SEQ ID NO: 3695 - DNA, 27 bp, Unknown
  Description of Unknown: gRNA target site sequence
tttcagcagtcaaaggcagtgatttat

SEQ ID NO: 3696 - DNA, 27 bp, Unknown
  Description of Unknown: gRNA target site sequence
tttgctataaatcactgcctttgactg

SEQ ID NO: 3697 - DNA, 27 bp, Unknown
  Description of Unknown: gRNA target site sequence
tttaacttctggctttgctataaatca

SEQ ID NO: 3698 - DNA, 27 bp, Unknown
  Description of Unknown: gRNA target site sequence
tttatagcaaagccagaagttaaaggt

SEQ ID NO: 3699 - DNA, 27 bp, Unknown
  Description of Unknown: gRNA target site sequence
tttacctttaacttctggctttgctat

SEQ ID NO: 3700 - DNA, 27 bp, Unknown
  Description of Unknown: gRNA target site sequence
ttttacctttaacttctggctttgcta

SEQ ID NO: 3701 - DNA, 27 bp, Unknown
  Description of Unknown: gRNA target site sequence
tttgctgccgcccaactgctccctgct

SEQ ID NO: 3702 - DNA, 27 bp, Unknown
  Description of Unknown: gRNA target site sequence
tttgccttatttgctgccgcccaactg

SEQ ID NO: 3703 - DNA, 27 bp, Unknown
  Description of Unknown: gRNA target site sequence
tttagtaggggcttcatgaatgcatgt

SEQ ID NO: 3704 - DNA, 27 bp, Unknown
  Description of Unknown: gRNA target site sequence
tttagtagagagacacaggcaatttca

SEQ ID NO: 3705 - DNA, 27 bp, Unknown
  Description of Unknown: gRNA target site sequence
tttcagacccttctatgagactggaag

SEQ ID NO: 3706 - DNA, 27 bp, Unknown
  Description of Unknown: gRNA target site sequence
tttccctcttaaatcacttccagtctc

SEQ ID NO: 3707 - DNA, 27 bp, Unknown
  Description of Unknown: gRNA target site sequence
tttaagagggaaaggatagccatagtc

SEQ ID NO: 3708 - DNA, 27 bp, Unknown
  Description of Unknown: gRNA target site sequence
tttgagctgggtttcaggatgagctca

SEQ ID NO: 3709 - DNA, 27 bp, Unknown
  Description of Unknown: gRNA target site sequence
tttcaggatgagctcacaagttccttt

SEQ ID NO: 3710 - DNA, 27 bp, Unknown
  Description of Unknown: gRNA target site sequence
tttaaaggaacttgtgagctcatcctg

SEQ ID NO: 3711 - DNA, 27 bp, Unknown
  Description of Unknown: gRNA target site sequence
tttgcttaagtcaattttttttaaagg

SEQ ID NO: 3712 - DNA, 27 bp, Unknown
  Description of Unknown: gRNA target site sequence
tttaaaaaaaattgacttaagcaaatc

SEQ ID NO: 3713 - DNA, 27 bp, Unknown
  Description of Unknown: gRNA target site sequence
tttgctatacaattcaaggttttaagg

SEQ ID NO: 3714 - DNA, 27 bp, Unknown
  Description of Unknown: gRNA target site sequence
ttttaaggtcctcggattcatatactt

SEQ ID NO: 3715 - DNA, 27 bp, Unknown
  Description of Unknown: gRNA target site sequence
tttaaggtcctcggattcatatacttt

SEQ ID NO: 3716 - DNA, 27 bp, Unknown
  Description of Unknown: gRNA target site sequence
tttataaagtatatgaatccgaggacc

SEQ ID NO: 3717 - DNA, 27 bp, Unknown
  Description of Unknown: gRNA target site sequence
tttataaatgaattagccagcttgttt

SEQ ID NO: 3718 - DNA, 27 bp, Unknown
  Description of Unknown: gRNA target site sequence
tttaaacaagctggctaattcatttat

SEQ ID NO: 3719 - DNA, 27 bp, Unknown
  Description of Unknown: gRNA target site sequence
ttttaaacaagctggctaattcattta

SEQ ID NO: 3720 - DNA, 27 bp, Unknown
  Description of Unknown: gRNA target site sequence
tttccctacattttaaacaagctggct

SEQ ID NO: 3721 - DNA, 27 bp, Unknown
  Description of Unknown: gRNA target site sequence
tttaaaatgtagggaaattgtgggaag

SEQ ID NO: 3722 - DNA, 27 bp, Unknown
  Description of Unknown: gRNA target site sequence
tttacttaattcaaggttttaaggttc

SEQ ID NO: 3723 - DNA, 27 bp, Unknown
  Description of Unknown: gRNA target site sequence
ttttaaggttctcttaatcaattctac

SEQ ID NO: 3724 - DNA, 27 bp, Unknown
  Description of Unknown: gRNA target site sequence
tttaaggttctcttaatcaattctact

SEQ ID NO: 3725 - DNA, 27 bp, Unknown
  Description of Unknown: gRNA target site sequence
tttaaataattggctaattagctagta

SEQ ID NO: 3726 - DNA, 27 bp, Unknown
  Description of Unknown: gRNA target site sequence
ttttaaataattggctaattagctagt

SEQ ID NO: 3727 - DNA, 27 bp, Unknown
  Description of Unknown: gRNA target site sequence
tttttaaataattggctaattagctag

SEQ ID NO: 3728 - DNA, 27 bp, Unknown
  Description of Unknown: gRNA target site sequence
tttatttttaaataattggctaattag

SEQ ID NO: 3729 - DNA, 27 bp, Unknown
  Description of Unknown: gRNA target site sequence
ttttatttttaaataattggctaatta

SEQ ID NO: 3730 - DNA, 27 bp, Unknown
  Description of Unknown: gRNA target site sequence
tttcaaacttttatttttaaataattg

SEQ ID NO: 3731 - DNA, 27 bp, Unknown
  Description of Unknown: gRNA target site sequence
tttaaaaataaaagtttgaaattgcca

SEQ ID NO: 3732 - DNA, 27 bp, Unknown
  Description of Unknown: gRNA target site sequence
tttggcaatttcaaacttttattttta

SEQ ID NO: 3733 - DNA, 27 bp, Unknown
  Description of Unknown: gRNA target site sequence
tttgaaattgccaaaaaaaaaagacaa

SEQ ID NO: 3734 - DNA, 27 bp, Unknown
  Description of Unknown: gRNA target site sequence
tttccttgtcttttttttttggcaatt

SEQ ID NO: 3735 - DNA, 27 bp, Unknown
  Description of Unknown: gRNA target site sequence
ttttccttgtcttttttttttggcaat

SEQ ID NO: 3736 - DNA, 27 bp, Unknown
  Description of Unknown: gRNA target site sequence
tttccttttccttgtcttttttttttg

SEQ ID NO: 3737 - DNA, 27 bp, Unknown
  Description of Unknown: gRNA target site sequence
tttctttccttttccttgtcttttttt

SEQ ID NO: 3738 - DNA, 27 bp, Unknown
  Description of Unknown: gRNA target site sequence
tttctttctttccttttccttgtcttt

SEQ ID NO: 3739 - DNA, 27 bp, Unknown
  Description of Unknown: gRNA target site sequence
tttggcatacaatacttaattgttgcc

SEQ ID NO: 3740 - DNA, 27 bp, Unknown
  Description of Unknown: gRNA target site sequence
tttcagatgcagatcctcagttttcag

SEQ ID NO: 3741 - DNA, 27 bp, Unknown
  Description of Unknown: gRNA target site sequence
ttttcagctcttcagagactgacacca

SEQ ID NO: 3742 - DNA, 27 bp, Unknown
  Description of Unknown: gRNA target site sequence
tttcagctcttcagagactgacaccag

SEQ ID NO: 3743 - DNA, 27 bp, Unknown
  Description of Unknown: gRNA target site sequence
tttaagccgtgtaacaaacctggtgtc

SEQ ID NO: 3744 - DNA, 27 bp, Unknown
  Description of Unknown: gRNA target site sequence
ttttaagccgtgtaacaaacctggtgt

SEQ ID NO: 3745 - DNA, 27 bp, Unknown
  Description of Unknown: gRNA target site sequence
tttgttacacggcttaaaatgatgagt

SEQ ID NO: 3746 - DNA, 27 bp, Unknown
  Description of Unknown: gRNA target site sequence
tttcttaaccaagaaggtctagagaga

SEQ ID NO: 3747 - DNA, 27 bp, Unknown
  Description of Unknown: gRNA target site sequence
tttgagtacctacttcatacaaactac

SEQ ID NO: 3748 - DNA, 27 bp, Unknown
  Description of Unknown: gRNA target site sequence
ttttgagtacctacttcatacaaacta

SEQ ID NO: 3749 - DNA, 27 bp, Unknown
  Description of Unknown: gRNA target site sequence
tttgtatgaagtaggtactcaaaagat

SEQ ID NO: 3750 - DNA, 27 bp, Unknown
  Description of Unknown: gRNA target site sequence
tttgatgatttaatttttactggagaa

SEQ ID NO: 3751 - DNA, 27 bp, Unknown
  Description of Unknown: gRNA target site sequence
tttcttctccagtaaaaattaaatcat

SEQ ID NO: 3752 - DNA, 27 bp, Unknown
  Description of Unknown: gRNA target site sequence
tttaatttttactggagaagaaatatt

SEQ ID NO: 3753 - DNA, 27 bp, Unknown
  Description of Unknown: gRNA target site sequence
tttttactggagaagaaatattcatat

SEQ ID NO: 3754 - DNA, 27 bp, Unknown
  Description of Unknown: gRNA target site sequence
ttttactggagaagaaatattcatata

SEQ ID NO: 3755 - DNA, 27 bp, Unknown
  Description of Unknown: gRNA target site sequence
tttactggagaagaaatattcatatat

SEQ ID NO: 3756 - DNA, 27 bp, Unknown
  Description of Unknown: gRNA target site sequence
tttaaaacatgtaaaaataagaaaaca

SEQ ID NO: 3757 - DNA, 27 bp, Unknown
  Description of Unknown: gRNA target site sequence
ttttcttatttttacatgttttaaata

SEQ ID NO: 3758 - DNA, 27 bp, Unknown
  Description of Unknown: gRNA target site sequence
tttcttatttttacatgttttaaatat

SEQ ID NO: 3759 - DNA, 27 bp, Unknown
  Description of Unknown: gRNA target site sequence
tttacatatttaaaacatgtaaaaata

SEQ ID NO: 3760 - DNA, 27 bp, Unknown
  Description of Unknown: gRNA target site sequence
tttttacatgttttaaatatgtaaaga

SEQ ID NO: 3761 - DNA, 27 bp, Unknown
  Description of Unknown: gRNA target site sequence
ttttacatgttttaaatatgtaaagat

SEQ ID NO: 3762 - DNA, 27 bp, Unknown
  Description of Unknown: gRNA target site sequence
tttacatgttttaaatatgtaaagatt

SEQ ID NO: 3763 - DNA, 27 bp, Unknown
  Description of Unknown: gRNA target site sequence
tttaatctttacatatttaaaacatgt

SEQ ID NO: 3764 - DNA, 27 bp, Unknown
  Description of Unknown: gRNA target site sequence
tttatttaatctttacatatttaaaac

SEQ ID NO: 3765 - DNA, 27 bp, Unknown
  Description of Unknown: gRNA target site sequence
ttttaaatatgtaaagattaaataaac

SEQ ID NO: 3766 - DNA, 27 bp, Unknown
  Description of Unknown: gRNA target site sequence
tttaaatatgtaaagattaaataaaca

SEQ ID NO: 3767 - DNA, 27 bp, Unknown
  Description of Unknown: gRNA target site sequence
tttaaatacttctaagagtgtttattt

SEQ ID NO: 3768 - DNA, 27 bp, Unknown
  Description of Unknown: gRNA target site sequence
tttaggaaatttaaatacttctaagag

SEQ ID NO: 3769 - DNA, 27 bp, Unknown
  Description of Unknown: gRNA target site sequence
tttactttaggaaatttaaatacttct

SEQ ID NO: 3770 - DNA, 27 bp, Unknown
  Description of Unknown: gRNA target site sequence
tttaaatttcctaaagtaaatttatct

SEQ ID NO: 3771 - DNA, 27 bp, Unknown
  Description of Unknown: gRNA target site sequence
tttcctaaagtaaatttatctcaacca

SEQ ID NO: 3772 - DNA, 27 bp, Unknown
  Description of Unknown: gRNA target site sequence
tttatctcaaccagtaacaggaccctc

SEQ ID NO: 3773 - DNA, 27 bp, Unknown
  Description of Unknown: gRNA target site sequence
tttccagtattgggagggtcctgttac

SEQ ID NO: 3774 - DNA, 27 bp, Unknown
  Description of Unknown: gRNA target site sequence
tttagtggtgatgagtgtgagcttgct

SEQ ID NO: 3775 - DNA, 27 bp, Unknown
  Description of Unknown: gRNA target site sequence
tttaggatttcttaagcttagagtcaa

SEQ ID NO: 3776 - DNA, 27 bp, Unknown
  Description of Unknown: gRNA target site sequence
tttcttaagcttagagtcaatacaata

SEQ ID NO: 3777 - DNA, 27 bp, Unknown
  Description of Unknown: gRNA target site sequence
tttattgtattgactctaagcttaaga

SEQ ID NO: 3778 - DNA, 27 bp, Unknown
  Description of Unknown: gRNA target site sequence
tttacttgtggttcatgaactcctgtg

SEQ ID NO: 3779 - DNA, 27 bp, Unknown
  Description of Unknown: gRNA target site sequence
ttttacttgtggttcatgaactcctgt

SEQ ID NO: 3780 - DNA, 27 bp, Unknown
  Description of Unknown: gRNA target site sequence
tttgtgagctaatcatatctcctcact

SEQ ID NO: 3781 - DNA, 27 bp, Unknown
  Description of Unknown: gRNA target site sequence
tttctgctctgtattaaagttatttgt

SEQ ID NO: 3782 - DNA, 27 bp, Unknown
  Description of Unknown: gRNA target site sequence
tttaatacagagcagaaagtaatgaac

SEQ ID NO: 3783 - DNA, 27 bp, Unknown
  Description of Unknown: gRNA target site sequence
tttggcagcagccattgtcatgtctat

SEQ ID NO: 3784 - DNA, 27 bp, Unknown
  Description of Unknown: gRNA target site sequence
ttttctcttctgaggacagatgtcccg

SEQ ID NO: 3785 - DNA, 27 bp, Unknown
  Description of Unknown: gRNA target site sequence
tttctcttctgaggacagatgtcccgt

SEQ ID NO: 3786 - DNA, 27 bp, Unknown
  Description of Unknown: gRNA target site sequence
tttcctgcttataaatcaccctatatt

SEQ ID NO: 3787 - DNA, 27 bp, Unknown
  Description of Unknown: gRNA target site sequence
tttataagcaggaaagtgtgtcctaga

SEQ ID NO: 3788 - DNA, 27 bp, Unknown
  Description of Unknown: gRNA target site sequence
tttctaggacacactttcctgcttata

SEQ ID NO: 3789 - DNA, 27 bp, Unknown
  Description of Unknown: gRNA target site sequence
tttattgtatttgtttttgcgatcagt

SEQ ID NO: 3790 - DNA, 27 bp, Unknown
  Description of Unknown: gRNA target site sequence
tttgtttttgcgatcagtgttagtaaa

SEQ ID NO: 3791 - DNA, 27 bp, Unknown
  Description of Unknown: gRNA target site sequence
tttactaacactgatcgcaaaaacaaa

SEQ ID NO: 3792 - DNA, 27 bp, Unknown
  Description of Unknown: gRNA target site sequence
tttttgcgatcagtgttagtaaagtgt

SEQ ID NO: 3793 - DNA, 27 bp, Unknown
  Description of Unknown: gRNA target site sequence
ttttgcgatcagtgttagtaaagtgtc

SEQ ID NO: 3794 - DNA, 27 bp, Unknown
  Description of Unknown: gRNA target site sequence
tttgcgatcagtgttagtaaagtgtca

SEQ ID NO: 3795 - DNA, 27 bp, Unknown
  Description of Unknown: gRNA target site sequence
tttgacactttactaacactgatcgca

SEQ ID NO: 3796 - DNA, 27 bp, Unknown
  Description of Unknown: gRNA target site sequence
ttttgagtttcacttgtcagactgact

SEQ ID NO: 3797 - DNA, 27 bp, Unknown
  Description of Unknown: gRNA target site sequence
tttgagtttcacttgtcagactgactg

SEQ ID NO: 3798 - DNA, 27 bp, Unknown
  Description of Unknown: gRNA target site sequence
tttcacttgtcagactgactggagagg

SEQ ID NO: 3799 - DNA, 27 bp, Unknown
  Description of Unknown: gRNA target site sequence
tttggcatgcagccactatttttgagt

SEQ ID NO: 3800 - DNA, 27 bp, Unknown
  Description of Unknown: gRNA target site sequence
tttttgagttgatgcaagcctctctgt

SEQ ID NO: 3801 - DNA, 27 bp, Unknown
  Description of Unknown: gRNA target site sequence
ttttgagttgatgcaagcctctctgta

SEQ ID NO: 3802 - DNA, 27 bp, Unknown
  Description of Unknown: gRNA target site sequence
tttgagttgatgcaagcctctctgtat

SEQ ID NO: 3803 - DNA, 27 bp, Unknown
  Description of Unknown: gRNA target site sequence
tttcccacaggataaaggagaccagct

SEQ ID NO: 3804 - DNA, 27 bp, Unknown
  Description of Unknown: gRNA target site sequence
ttttcccacaggataaaggagaccagc

SEQ ID NO: 3805 - DNA, 27 bp, Unknown
  Description of Unknown: gRNA target site sequence
tttgttctcttttcccacaggataaag

SEQ ID NO: 3806 - DNA, 27 bp, Unknown
  Description of Unknown: gRNA target site sequence
tttatcctgtgggaaaagagaacaaag

SEQ ID NO: 3807 - DNA, 27 bp, Unknown
  Description of Unknown: gRNA target site sequence
tttctccttcccttgaacactcccatg

SEQ ID NO: 3808 - DNA, 27 bp, Unknown
  Description of Unknown: gRNA target site sequence
tttatttctccttcccttgaacactcc

SEQ ID NO: 3809 - DNA, 27 bp, Unknown
  Description of Unknown: gRNA target site sequence
tttttgacatatactttgagagataaa

SEQ ID NO: 3810 - DNA, 27 bp, Unknown
  Description of Unknown: gRNA target site sequence
tttatctctcaaagtatatgtcaaaaa

SEQ ID NO: 3811 - DNA, 27 bp, Unknown
  Description of Unknown: gRNA target site sequence
ttttgacatatactttgagagataaag

SEQ ID NO: 3812 - DNA, 27 bp, Unknown
  Description of Unknown: gRNA target site sequence
tttgacatatactttgagagataaagc

SEQ ID NO: 3813 - DNA, 27 bp, Unknown
  Description of Unknown: gRNA target site sequence
tttgagagataaagcaagattctgtac

SEQ ID NO: 3814 - DNA, 27 bp, Unknown
  Description of Unknown: gRNA target site sequence
tttcccctaccactcattatagttccg

SEQ ID NO: 3815 - DNA, 27 bp, Unknown
  Description of Unknown: gRNA target site sequence
tttcacatatagtaagagataattaga

SEQ ID NO: 3816 - DNA, 27 bp, Unknown
  Description of Unknown: gRNA target site sequence
ttttcacatatagtaagagataattag

SEQ ID NO: 3817 - DNA, 27 bp, Unknown
  Description of Unknown: gRNA target site sequence
tttttcacatatagtaagagataatta

SEQ ID NO: 3818 - DNA, 27 bp, Unknown
  Description of Unknown: gRNA target site sequence
ttttttcacatatagtaagagataatt

SEQ ID NO: 3819 - DNA, 27 bp, Unknown
  Description of Unknown: gRNA target site sequence
tttttttcacatatagtaagagataat

SEQ ID NO: 3820 - DNA, 27 bp, Unknown
  Description of Unknown: gRNA target site sequence
tttggggcaagtcacacttcccccatg

SEQ ID NO: 3821 - DNA, 27 bp, Unknown
  Description of Unknown: gRNA target site sequence
tttcatggtagagccaggtcttctgtt

SEQ ID NO: 3822 - DNA, 27 bp, Unknown
  Description of Unknown: gRNA target site sequence
tttgtcatatcagtgttcttcctgcca

SEQ ID NO: 3823 - DNA, 27 bp, Unknown
  Description of Unknown: gRNA target site sequence
tttcttactgagaaatagattcttcaa

SEQ ID NO: 3824 - DNA, 27 bp, Unknown
  Description of Unknown: gRNA target site sequence
ttttcttactgagaaatagattcttca

SEQ ID NO: 3825 - DNA, 27 bp, Unknown
  Description of Unknown: gRNA target site sequence
tttctcagtaagaaaatatctttatgg

SEQ ID NO: 3826 - DNA, 27 bp, Unknown
  Description of Unknown: gRNA target site sequence
tttccagctactctccataaagatatt

SEQ ID NO: 3827 - DNA, 27 bp, Unknown
  Description of Unknown: gRNA target site sequence
ttttccagctactctccataaagatat

SEQ ID NO: 3828 - DNA, 27 bp, Unknown
  Description of Unknown: gRNA target site sequence
tttatggagagtagctggaaaacagtt

SEQ ID NO: 3829 - DNA, 27 bp, Unknown
  Description of Unknown: gRNA target site sequence
tttctccccccttcaacgaatctatca

SEQ ID NO: 3830 - DNA, 27 bp, Unknown
  Description of Unknown: gRNA target site sequence
ttttctccccccttcaacgaatctatc

SEQ ID NO: 3831 - DNA, 27 bp, Unknown
  Description of Unknown: gRNA target site sequence
tttggcttttccatgctagcaatgcac

SEQ ID NO: 3832 - DNA, 27 bp, Unknown
  Description of Unknown: gRNA target site sequence
ttttccatgctagcaatgcacgtggcc

SEQ ID NO: 3833 - DNA, 27 bp, Unknown
  Description of Unknown: gRNA target site sequence
tttccatgctagcaatgcacgtggccc

SEQ ID NO: 3834 - DNA, 27 bp, Unknown
  Description of Unknown: gRNA target site sequence
tttgtgtgtgagtatgcatctccaggc

SEQ ID NO: 3835 - DNA, 27 bp, Unknown
  Description of Unknown: gRNA target site sequence
tttgcctggagatgcatactcacacac

SEQ ID NO: 3836 - DNA, 27 bp, Unknown
  Description of Unknown: gRNA target site sequence
tttccactggaggtgcccgtgcagatg

SEQ ID NO: 3837 - DNA, 27 bp, Unknown
  Description of Unknown: gRNA target site sequence
tttgctcaccaattacataaatctggg

SEQ ID NO: 3838 - DNA, 27 bp, Unknown
  Description of Unknown: gRNA target site sequence
tttatgtaattggtgagcaaagccatt

SEQ ID NO: 3839 - DNA, 27 bp, Unknown
  Description of Unknown: gRNA target site sequence
tttcactgagttgacacctgttgcatt

SEQ ID NO: 3840 - DNA, 27 bp, Unknown
  Description of Unknown: gRNA target site sequence
tttgtgcatagaagactgcaatgcaac

SEQ ID NO: 3841 - DNA, 27 bp, Unknown
  Description of Unknown: gRNA target site sequence
ttttgtgcatagaagactgcaatgcaa

SEQ ID NO: 3842 - DNA, 27 bp, Unknown
  Description of Unknown: gRNA target site sequence
tttttgtgcatagaagactgcaatgca

SEQ ID NO: 3843 - DNA, 27 bp, Unknown
  Description of Unknown: gRNA target site sequence
ttttgttccttaatttcaggaggttta

SEQ ID NO: 3844 - DNA, 27 bp, Unknown
  Description of Unknown: gRNA target site sequence
tttgttccttaatttcaggaggtttac

SEQ ID NO: 3845 - DNA, 27 bp, Unknown
  Description of Unknown: gRNA target site sequence
tttcaggaggtttacttttaggactgt

SEQ ID NO: 3846 - DNA, 27 bp, Unknown
  Description of Unknown: gRNA target site sequence
tttacttttaggactgtggacattctc

SEQ ID NO: 3847 - DNA, 27 bp, Unknown
  Description of Unknown: gRNA target site sequence
ttttaggactgtggacattctctttaa

SEQ ID NO: 3848 - DNA, 27 bp, Unknown
  Description of Unknown: gRNA target site sequence
tttaggactgtggacattctctttaag

SEQ ID NO: 3849 - DNA, 27 bp, Unknown
  Description of Unknown: gRNA target site sequence
tttaagagttctgtaccacatggtagc

SEQ ID NO: 3850 - DNA, 27 bp, Unknown
  Description of Unknown: gRNA target site sequence
tttacagtcagaatgctattaaggttg

SEQ ID NO: 3851 - DNA, 27 bp, Unknown
  Description of Unknown: gRNA target site sequence
ttttacagtcagaatgctattaaggtt

SEQ ID NO: 3852 - DNA, 27 bp, Unknown
  Description of Unknown: gRNA target site sequence
tttattttacagtcagaatgctattaa

SEQ ID NO: 3853 - DNA, 27 bp, Unknown
  Description of Unknown: gRNA target site sequence
ttttattttacagtcagaatgctatta

SEQ ID NO: 3854 - DNA, 27 bp, Unknown
  Description of Unknown: gRNA target site sequence
tttggggaagttggggctctcgctctg

SEQ ID NO: 3855 - DNA, 27 bp, Unknown
  Description of Unknown: gRNA target site sequence
tttgatctgtacttttgatatgatatg

SEQ ID NO: 3856 - DNA, 27 bp, Unknown
  Description of Unknown: gRNA target site sequence
ttttgatatgatatgatgctcctgggg

SEQ ID NO: 3857 - DNA, 27 bp, Unknown
  Description of Unknown: gRNA target site sequence
tttgatatgatatgatgctcctgggga

SEQ ID NO: 3858 - DNA, 27 bp, Unknown
  Description of Unknown: gRNA target site sequence
tttgggactacttccccaggagcatca

SEQ ID NO: 3859 - DNA, 27 bp, Unknown
  Description of Unknown: gRNA target site sequence
tttggctatttgggactacttccccag

SEQ ID NO: 3860 - DNA, 27 bp, Unknown
  Description of Unknown: gRNA target site sequence
tttaggggtggacctcaaggcctggaa

SEQ ID NO: 3861 - DNA, 27 bp, Unknown
  Description of Unknown: gRNA target site sequence
tttcaccaatgttggggagtagagccc

SEQ ID NO: 3862 - DNA, 27 bp, Unknown
  Description of Unknown: gRNA target site sequence
tttaaactctagggctctactccccaa

SEQ ID NO: 3863 - DNA, 27 bp, Unknown
  Description of Unknown: gRNA target site sequence
ttttaaactctagggctctactcccca

SEQ ID NO: 3864 - DNA, 27 bp, Unknown
  Description of Unknown: gRNA target site sequence
tttaaaactgtctcagggaggctctgc

SEQ ID NO: 3865 - DNA, 27 bp, Unknown
  Description of Unknown: gRNA target site sequence
tttgttttctgttgcagatccagaacc

SEQ ID NO: 3866 - DNA, 27 bp, Unknown
  Description of Unknown: gRNA target site sequence
ttttctgttgcagatccagaaccgtgc

SEQ ID NO: 3867 - DNA, 27 bp, Unknown
  Description of Unknown: gRNA target site sequence
tttctgttgcagatccagaaccgtgcc

SEQ ID NO: 3868 - DNA, 27 bp, Unknown
  Description of Unknown: gRNA target site sequence
tttatagctttctcctcacagctgttt

SEQ ID NO: 3869 - DNA, 27 bp, Unknown
  Description of Unknown: gRNA target site sequence
tttctcctcacagctgtttctttgagc

SEQ ID NO: 3870 - DNA, 27 bp, Unknown
  Description of Unknown: gRNA target site sequence
tttgctcaaagaaacagctgtgaggag

SEQ ID NO: 3871 - DNA, 27 bp, Unknown
  Description of Unknown: gRNA target site sequence
ttttgctcaaagaaacagctgtgagga

SEQ ID NO: 3872 - DNA, 27 bp, Unknown
  Description of Unknown: gRNA target site sequence
tttctttgagcaaaatggtgagtgtgg

SEQ ID NO: 3873 - DNA, 27 bp, Unknown
  Description of Unknown: gRNA target site sequence
tttgagcaaaatggtgagtgtggtgct

SEQ ID NO: 3874 - DNA, 27 bp, Unknown
  Description of Unknown: gRNA target site sequence
tttggccagttgataccactaaaggta

SEQ ID NO: 3875 - DNA, 27 bp, Unknown
  Description of Unknown: gRNA target site sequence
ttttggccagttgataccactaaaggt

SEQ ID NO: 3876 - DNA, 27 bp, Unknown
  Description of Unknown: gRNA target site sequence
tttagtggtatcaactggccaaaagat

SEQ ID NO: 3877 - DNA, 27 bp, Unknown
  Description of Unknown: gRNA target site sequence
tttagtgttcttgagatgagatgaggc

SEQ ID NO: 3878 - DNA, 27 bp, Unknown
  Description of Unknown: gRNA target site sequence
tttattgcctcatctcatctcaagaac

SEQ ID NO: 3879 - DNA, 27 bp, Unknown
  Description of Unknown: gRNA target site sequence
tttaccactgtccttcctcttcattta

SEQ ID NO: 3880 - DNA, 27 bp, Unknown
  Description of Unknown: gRNA target site sequence
tttgaggtttcagaatgactaatattt

SEQ ID NO: 3881 - DNA, 27 bp, Unknown
  Description of Unknown: gRNA target site sequence
tttcagaatgactaatattttagatga

SEQ ID NO: 3882 - DNA, 27 bp, Unknown
  Description of Unknown: gRNA target site sequence
ttttagatgaatttgtttgacattgaa

SEQ ID NO: 3883 - DNA, 27 bp, Unknown
  Description of Unknown: gRNA target site sequence
tttagatgaatttgtttgacattgaat

SEQ ID NO: 3884 - DNA, 27 bp, Unknown
  Description of Unknown: gRNA target site sequence
tttgtttgacattgaatgttcatgtgc

SEQ ID NO: 3885 - DNA, 27 bp, Unknown
  Description of Unknown: gRNA target site sequence
tttgacattgaatgttcatgtgcttct

SEQ ID NO: 3886 - DNA, 27 bp, Unknown
  Description of Unknown: gRNA target site sequence
tttcaatttgagtaaccgttgcaataa

SEQ ID NO: 3887 - DNA, 27 bp, Unknown
  Description of Unknown: gRNA target site sequence
tttgagtaaccgttgcaataacatggg

SEQ ID NO: 3888 - DNA, 27 bp, Unknown
  Description of Unknown: gRNA target site sequence
ttttgctctttgtcttcatgacaactg

SEQ ID NO: 3889 - DNA, 27 bp, Unknown
  Description of Unknown: gRNA target site sequence
tttgctctttgtcttcatgacaactgt

SEQ ID NO: 3890 - DNA, 27 bp, Unknown
  Description of Unknown: gRNA target site sequence
tttgtcttcatgacaactgtacttaag

SEQ ID NO: 3891 - DNA, 27 bp, Unknown
  Description of Unknown: gRNA target site sequence
tttcagggctgttagcttaagtacagt

SEQ ID NO: 3892 - DNA, 27 bp, Unknown
  Description of Unknown: gRNA target site sequence
tttattctccttctccatgtccctctc

SEQ ID NO: 3893 - DNA, 27 bp, Unknown
  Description of Unknown: gRNA target site sequence
tttgcttgactgggacgttttgccttc

SEQ ID NO: 3894 - DNA, 27 bp, Unknown
  Description of Unknown: gRNA target site sequence
ttttgccttccccttcagccaggaagt

SEQ ID NO: 3895 - DNA, 27 bp, Unknown
  Description of Unknown: gRNA target site sequence
tttgccttccccttcagccaggaagtg

SEQ ID NO: 3896 - DNA, 27 bp, Unknown
  Description of Unknown: gRNA target site sequence
tttcacttcctggctgaaggggaaggc

SEQ ID NO: 3897 - DNA, 27 bp, Unknown
  Description of Unknown: gRNA target site sequence
tttttatttatcacaggtgttggtatt

SEQ ID NO: 3898 - DNA, 27 bp, Unknown
  Description of Unknown: gRNA target site sequence
ttttatttatcacaggtgttggtattg

SEQ ID NO: 3899 - DNA, 27 bp, Unknown
  Description of Unknown: gRNA target site sequence
tttatttatcacaggtgttggtattgg

SEQ ID NO: 3900 - DNA, 27 bp, Unknown
  Description of Unknown: gRNA target site sequence
tttatcacaggtgttggtattggtggt

SEQ ID NO: 3901 - DNA, 27 bp, Unknown
  Description of Unknown: gRNA target site sequence
tttctttttgacagtccctctcagaca

SEQ ID NO: 3902 - DNA, 27 bp, Unknown
  Description of Unknown: gRNA target site sequence
tttttgacagtccctctcagacacctc

SEQ ID NO: 3903 - DNA, 27 bp, Unknown
  Description of Unknown: gRNA target site sequence
ttttgacagtccctctcagacacctct

SEQ ID NO: 3904 - DNA, 27 bp, Unknown
  Description of Unknown: gRNA target site sequence
tttgacagtccctctcagacacctctg

SEQ ID NO: 3905 - DNA, 27 bp, Unknown
  Description of Unknown: gRNA target site sequence
tttgtaatggcaaagctggccttaggc

SEQ ID NO: 3906 - DNA, 27 bp, Unknown
  Description of Unknown: gRNA target site sequence
tttgccattacaaactctcccttctcc

SEQ ID NO: 3907 - DNA, 27 bp, Unknown
  Description of Unknown: gRNA target site sequence
tttctctctctctctttctccctctct

SEQ ID NO: 3908 - DNA, 27 bp, Unknown
  Description of Unknown: gRNA target site sequence
tttctccctctctgtctcttatacaca

SEQ ID NO: 3909 - DNA, 27 bp, Unknown
  Description of Unknown: gRNA target site sequence
tttgtgtatgtgtataagagacagaga

SEQ ID NO: 3910 - DNA, 27 bp, Unknown
  Description of Unknown: gRNA target site sequence
tttgctgtaggttcagcagtggggatg

SEQ ID NO: 3911 - DNA, 27 bp, Unknown
  Description of Unknown: gRNA target site sequence
tttctcatccccactgctgaacctaca

SEQ ID NO: 3912 - DNA, 27 bp, Unknown
  Description of Unknown: gRNA target site sequence
tttgagagctgtatttctcatccccac

SEQ ID NO: 3913 - DNA, 27 bp, Unknown
  Description of Unknown: gRNA target site sequence
tttagttatcctgtttgagagctgtat

SEQ ID NO: 3914 - DNA, 27 bp, Unknown
  Description of Unknown: gRNA target site sequence
tttctgggtgttctttctgaagctttc

SEQ ID NO: 3915 - DNA, 27 bp, Unknown
  Description of Unknown: gRNA target site sequence
tttgagaaagcttcagaaagaacaccc

SEQ ID NO: 3916 - DNA, 27 bp, Unknown
  Description of Unknown: gRNA target site sequence
tttctgaagctttctcaaagtctcttt

SEQ ID NO: 3917 - DNA, 27 bp, Unknown
  Description of Unknown: gRNA target site sequence
tttctcaaagtctctttctcctatctt

SEQ ID NO: 3918 - DNA, 27 bp, Unknown
  Description of Unknown: gRNA target site sequence
tttctcctatcttccattcaaggcaaa

SEQ ID NO: 3919 - DNA, 27 bp, Unknown
  Description of Unknown: gRNA target site sequence
tttgccttgaatggaagataggagaaa

SEQ ID NO: 3920 - DNA, 27 bp, Unknown
  Description of Unknown: gRNA target site sequence
tttgatgttaaatggcaatcatttgcc

SEQ ID NO: 3921 - DNA, 27 bp, Unknown
  Description of Unknown: gRNA target site sequence
ttttgatgttaaatggcaatcatttgc

SEQ ID NO: 3922 - DNA, 27 bp, Unknown
  Description of Unknown: gRNA target site sequence
tttaacatcaaaatcacagttatttat

SEQ ID NO: 3923 - DNA, 27 bp, Unknown
  Description of Unknown: gRNA target site sequence
tttagataaataactgtgattttgatg

SEQ ID NO: 3924 - DNA, 27 bp, Unknown
  Description of Unknown: gRNA target site sequence
ttttagataaataactgtgattttgat

SEQ ID NO: 3925 - DNA, 27 bp, Unknown
  Description of Unknown: gRNA target site sequence
tttattttagataaataactgtgattt

SEQ ID NO: 3926 - DNA, 27 bp, Unknown
  Description of Unknown: gRNA target site sequence
tttatctaaaataaattttaatagctg

SEQ ID NO: 3927 - DNA, 27 bp, Unknown
  Description of Unknown: gRNA target site sequence
tttcttgattcagctattaaaatttat

SEQ ID NO: 3928 - DNA, 27 bp, Unknown
  Description of Unknown: gRNA target site sequence
ttttcttgattcagctattaaaattta

SEQ ID NO: 3929 - DNA, 27 bp, Unknown
  Description of Unknown: gRNA target site sequence
ttttaatagctgaatcaagaaaatctc

SEQ ID NO: 3930 - DNA, 27 bp, Unknown
  Description of Unknown: gRNA target site sequence
tttaatagctgaatcaagaaaatctcc

SEQ ID NO: 3931 - DNA, 27 bp, Unknown
  Description of Unknown: gRNA target site sequence
tttataattctgtatgctgtgaacatt

SEQ ID NO: 3932 - DNA, 27 bp, Unknown
  Description of Unknown: gRNA target site sequence
tttttaaccagctagggacccaatatg

SEQ ID NO: 3933 - DNA, 27 bp, Unknown
  Description of Unknown: gRNA target site sequence
ttttaaccagctagggacccaatatgt

SEQ ID NO: 3934 - DNA, 27 bp, Unknown
  Description of Unknown: gRNA target site sequence
tttaaccagctagggacccaatatgtg

SEQ ID NO: 3935 - DNA, 27 bp, Unknown
  Description of Unknown: gRNA target site sequence
tttagctgtcaaacacaaaaagaaaca

SEQ ID NO: 3936 - DNA, 27 bp, Unknown
  Description of Unknown: gRNA target site sequence
tttctttttgtgtttgacagctaaaga

SEQ ID NO: 3937 - DNA, 27 bp, Unknown
  Description of Unknown: gRNA target site sequence
tttctttagctgtcaaacacaaaaaga

SEQ ID NO: 3938 - DNA, 27 bp, Unknown
  Description of Unknown: gRNA target site sequence
tttgtgtttgacagctaaagaaaagaa

SEQ ID NO: 3939 - DNA, 27 bp, Unknown
  Description of Unknown: gRNA target site sequence
tttgacagctaaagaaaagaagccctc

SEQ ID NO: 3940 - DNA, 27 bp, Unknown
  Description of Unknown: gRNA target site sequence
tttcacatagacccctgttgtaagagg

SEQ ID NO: 3941 - DNA, 27 bp, Unknown
  Description of Unknown: gRNA target site sequence
ttttcacatagacccctgttgtaagag

SEQ ID NO: 3942 - DNA, 27 bp, Unknown
  Description of Unknown: gRNA target site sequence
tttcacattctggctctgttgggggca

SEQ ID NO: 3943 - DNA, 27 bp, Unknown
  Description of Unknown: gRNA target site sequence
ttttcacattctggctctgttgggggc

SEQ ID NO: 3944 - DNA, 27 bp, Unknown
  Description of Unknown: gRNA target site sequence
tttcagccttattttattcccatcaat

SEQ ID NO: 3945 - DNA, 27 bp, Unknown
  Description of Unknown: gRNA target site sequence
tttctcaattgatgggaataaaataag

SEQ ID NO: 3946 - DNA, 27 bp, Unknown
  Description of Unknown: gRNA target site sequence
ttttattcccatcaattgagaaaccat

SEQ ID NO: 3947 - DNA, 27 bp, Unknown
  Description of Unknown: gRNA target site sequence
tttattcccatcaattgagaaaccatt

SEQ ID NO: 3948 - DNA, 27 bp, Unknown
  Description of Unknown: gRNA target site sequence
tttcaatttccaagagctgaggcaatt

SEQ ID NO: 3949 - DNA, 27 bp, Unknown
  Description of Unknown: gRNA target site sequence
tttccaagagctgaggcaattctaact

SEQ ID NO: 3950 - DNA, 27 bp, Unknown
  Description of Unknown: gRNA target site sequence
tttgctatccagctatttttatttgtt

SEQ ID NO: 3951 - DNA, 27 bp, Unknown
  Description of Unknown: gRNA target site sequence
tttatttgtttgtgcatttggggggaa

SEQ ID NO: 3952 - DNA, 27 bp, Unknown
  Description of Unknown: gRNA target site sequence
tttgtttgtgcatttggggggaattca

SEQ ID NO: 3953 - DNA, 27 bp, Unknown
  Description of Unknown: gRNA target site sequence
tttgtgcatttggggggaattcatctc

SEQ ID NO: 3954 - DNA, 27 bp, Unknown
  Description of Unknown: gRNA target site sequence
tttggggggaattcatctctctttaat

SEQ ID NO: 3955 - DNA, 27 bp, Unknown
  Description of Unknown: gRNA target site sequence
tttatattaaagagagatgaattcccc

SEQ ID NO: 3956 - DNA, 27 bp, Unknown
  Description of Unknown: gRNA target site sequence
tttaatataaagttggatgcggaaccc

SEQ ID NO: 3957 - DNA, 27 bp, Unknown
  Description of Unknown: gRNA target site sequence
tttgggttccgcatccaactttatatt

SEQ ID NO: 3958 - DNA, 27 bp, Unknown
  Description of Unknown: gRNA target site sequence
tttaaattgtagtacacgtaatttggg

SEQ ID NO: 3959 - DNA, 27 bp, Unknown
  Description of Unknown: gRNA target site sequence
tttgctttaaattgtagtacacgtaat

SEQ ID NO: 3960 - DNA, 27 bp, Unknown
  Description of Unknown: gRNA target site sequence
tttctactcctttgctttaaattgtag

SEQ ID NO: 3961 - DNA, 27 bp, Unknown
  Description of Unknown: gRNA target site sequence
tttaaagcaaaggagtagaaagacaga

SEQ ID NO: 3962 - DNA, 27 bp, Unknown
  Description of Unknown: gRNA target site sequence
tttctgtcacatcagctccactttcag

SEQ ID NO: 3963 - DNA, 27 bp, Unknown
  Description of Unknown: gRNA target site sequence
tttcactgaaagtggagctgatgtgac

SEQ ID NO: 3964 - DNA, 27 bp, Unknown
  Description of Unknown: gRNA target site sequence
tttcagtgaaagcatcacttgggatta

SEQ ID NO: 3965 - DNA, 27 bp, Unknown
  Description of Unknown: gRNA target site sequence
tttgggctgtgccattccctaacttaa

SEQ ID NO: 3966 - DNA, 27 bp, Unknown
  Description of Unknown: gRNA target site sequence
tttccttctttgggctgtgccattccc

SEQ ID NO: 3967 - DNA, 27 bp, Unknown
  Description of Unknown: gRNA target site sequence
tttacgtatgagacgtttatagccgaa

SEQ ID NO: 3968 - DNA, 27 bp, Unknown
  Description of Unknown: gRNA target site sequence
tttcggctataaacgtctcatacgtaa

SEQ ID NO: 3969 - DNA, 27 bp, Unknown
  Description of Unknown: gRNA target site sequence
tttatagccgaaatgatcttttcaagt

SEQ ID NO: 3970 - DNA, 27 bp, Unknown
  Description of Unknown: gRNA target site sequence
tttaacttgaaaagatcatttcggcta

SEQ ID NO: 3971 - DNA, 27 bp, Unknown
  Description of Unknown: gRNA target site sequence
ttttcaagttaaattttatgcctttta

SEQ ID NO: 3972 - DNA, 27 bp, Unknown
  Description of Unknown: gRNA target site sequence
tttcaagttaaattttatgccttttat

SEQ ID NO: 3973 - DNA, 27 bp, Unknown
  Description of Unknown: gRNA target site sequence
tttaagaaataaaaggcataaaattta

SEQ ID NO: 3974 - DNA, 27 bp, Unknown
  Description of Unknown: gRNA target site sequence
ttttatgccttttatttcttaaacaaa

SEQ ID NO: 3975 - DNA, 27 bp, Unknown
  Description of Unknown: gRNA target site sequence
tttgtttaagaaataaaaggcataaaa

SEQ ID NO: 3976 - DNA, 27 bp, Unknown
  Description of Unknown: gRNA target site sequence
tttatgccttttatttcttaaacaaat

SEQ ID NO: 3977 - DNA, 27 bp, Unknown
  Description of Unknown: gRNA target site sequence
ttttatttcttaaacaaatgtatgatt

SEQ ID NO: 3978 - DNA, 27 bp, Unknown
  Description of Unknown: gRNA target site sequence
tttatttcttaaacaaatgtatgatta

SEQ ID NO: 3979 - DNA, 27 bp, Unknown
  Description of Unknown: gRNA target site sequence
tttcttaaacaaatgtatgattacatc

SEQ ID NO: 3980 - DNA, 27 bp, Unknown
  Description of Unknown: gRNA target site sequence
tttgaagccttgatgtaatcatacatt

SEQ ID NO: 3981 - DNA, 27 bp, Unknown
  Description of Unknown: gRNA target site sequence
ttttgaagccttgatgtaatcatacat

SEQ ID NO: 3982 - DNA, 27 bp, Unknown
  Description of Unknown: gRNA target site sequence
tttttgaagccttgatgtaatcataca

SEQ ID NO: 3983 - DNA, 27 bp, Unknown
  Description of Unknown: gRNA target site sequence
tttagcatcactggctaaaacatagcc

SEQ ID NO: 3984 - DNA, 27 bp, Unknown
  Description of Unknown: gRNA target site sequence
ttttagccagtgatgctaaaggttgta

SEQ ID NO: 3985 - DNA, 27 bp, Unknown
  Description of Unknown: gRNA target site sequence
tttagccagtgatgctaaaggttgtat

SEQ ID NO: 3986 - DNA, 27 bp, Unknown
  Description of Unknown: gRNA target site sequence
ttttaatttgatagtattgtgcataga

SEQ ID NO: 3987 - DNA, 27 bp, Unknown
  Description of Unknown: gRNA target site sequence
tttaatttgatagtattgtgcatagag

SEQ ID NO: 3988 - DNA, 27 bp, Unknown
  Description of Unknown: gRNA target site sequence
tttgatagtattgtgcatagagccacg

SEQ ID NO: 3989 - DNA, 27 bp, Unknown
  Description of Unknown: gRNA target site sequence
tttttgtgtatttgttaatggtttgaa

SEQ ID NO: 3990 - DNA, 27 bp, Unknown
  Description of Unknown: gRNA target site sequence
ttttgtgtatttgttaatggtttgaat

SEQ ID NO: 3991 - DNA, 27 bp, Unknown
  Description of Unknown: gRNA target site sequence
tttgtgtatttgttaatggtttgaata

SEQ ID NO: 3992 - DNA, 27 bp, Unknown
  Description of Unknown: gRNA target site sequence
tttatattcaaaccattaacaaataca

SEQ ID NO: 3993 - DNA, 27 bp, Unknown
  Description of Unknown: gRNA target site sequence
tttgttaatggtttgaatataaacact

SEQ ID NO: 3994 - DNA, 27 bp, Unknown
  Description of Unknown: gRNA target site sequence
tttgaatataaacactatatggcagtg

SEQ ID NO: 3995 - DNA, 27 bp, Unknown
  Description of Unknown: gRNA target site sequence
tttccaccttgggtcccagggaagttt

SEQ ID NO: 3996 - DNA, 27 bp, Unknown
  Description of Unknown: gRNA target site sequence
ttttgtggaggagctcaggacactaat

SEQ ID NO: 3997 - DNA, 27 bp, Unknown
  Description of Unknown: gRNA target site sequence
tttgtggaggagctcaggacactaata

SEQ ID NO: 3998 - DNA, 27 bp, Unknown
  Description of Unknown: gRNA target site sequence
tttccaagctagttagcaaatgacctt

SEQ ID NO: 3999 - DNA, 27 bp, Unknown
  Description of Unknown: gRNA target site sequence
tttgctaactagcttggaaactggatg

SEQ ID NO: 4000 - DNA, 27 bp, Unknown
  Description of Unknown: gRNA target site sequence
tttggggcttttacaccagttcctttc

SEQ ID NO: 4001 - DNA, 27 bp, Unknown
  Description of Unknown: gRNA target site sequence
ttttacaccagttcctttcaatggttt

SEQ ID NO: 4002 - DNA, 27 bp, Unknown
  Description of Unknown: gRNA target site sequence
tttacaccagttcctttcaatggtttg

SEQ ID NO: 4003 - DNA, 27 bp, Unknown
  Description of Unknown: gRNA target site sequence
tttcaatggtttgcaaggaagccacag

SEQ ID NO: 4004 - DNA, 27 bp, Unknown
  Description of Unknown: gRNA target site sequence
tttgcaaggaagccacagctggtggta

SEQ ID NO: 4005 - DNA, 27 bp, Unknown
  Description of Unknown: gRNA target site sequence
tttgtaagaattgggcccatcgaactg

SEQ ID NO: 4006 - DNA, 27 bp, Unknown
  Description of Unknown: gRNA target site sequence
tttcagaaaccttcatgcaccccattc

SEQ ID NO: 4007 - DNA, 27 bp, Unknown
  Description of Unknown: gRNA target site sequence
ttttcagaaaccttcatgcaccccatt

SEQ ID NO: 4008 - DNA, 27 bp, Unknown
  Description of Unknown: gRNA target site sequence
tttctgaaaattaacactgcttgtgtt

SEQ ID NO: 4009 - DNA, 27 bp, Unknown
  Description of Unknown: gRNA target site sequence
tttcatggaaaatattgagttaaaaac

SEQ ID NO: 4010 - DNA, 27 bp, Unknown
  Description of Unknown: gRNA target site sequence
tttttaactcaatattttccatgaaaa

SEQ ID NO: 4011 - DNA, 27 bp, Unknown
  Description of Unknown: gRNA target site sequence
ttttcatggaaaatattgagttaaaaa

SEQ ID NO: 4012 - DNA, 27 bp, Unknown
  Description of Unknown: gRNA target site sequence
ttttaactcaatattttccatgaaaat

SEQ ID NO: 4013 - DNA, 27 bp, Unknown
  Description of Unknown: gRNA target site sequence
tttaactcaatattttccatgaaaatg

SEQ ID NO: 4014 - DNA, 27 bp, Unknown
  Description of Unknown: gRNA target site sequence
ttttccatgaaaatgcaacaacatgta

SEQ ID NO: 4015 - DNA, 27 bp, Unknown
  Description of Unknown: gRNA target site sequence
tttccatgaaaatgcaacaacatgtat

SEQ ID NO: 4016 - DNA, 27 bp, Unknown
  Description of Unknown: gRNA target site sequence
tttaattaaaaatattatacatgttgt

SEQ ID NO: 4017 - DNA, 27 bp, Unknown
  Description of Unknown: gRNA target site sequence
tttatttaattaaaaatattatacatg

SEQ ID NO: 4018 - DNA, 27 bp, Unknown
  Description of Unknown: gRNA target site sequence
tttaattaaataaaaatctgtggtggt

SEQ ID NO: 4019 - DNA, 27 bp, Unknown
  Description of Unknown: gRNA target site sequence
ttttccggagttgtctttatcatcctt

SEQ ID NO: 4020 - DNA, 27 bp, Unknown
  Description of Unknown: gRNA target site sequence
tttccggagttgtctttatcatccttg

SEQ ID NO: 4021 - DNA, 27 bp, Unknown
  Description of Unknown: gRNA target site sequence
tttatcatccttgcatttgaatattgt

SEQ ID NO: 4022 - DNA, 27 bp, Unknown
  Description of Unknown: gRNA target site sequence
tttgaacacaatattcaaatgcaagga

SEQ ID NO: 4023 - DNA, 27 bp, Unknown
  Description of Unknown: gRNA target site sequence
tttgaatattgtgttcaaatttttgat

SEQ ID NO: 4024 - DNA, 27 bp, Unknown
  Description of Unknown: gRNA target site sequence
tttgattgattcattcagtatctggtg

SEQ ID NO: 4025 - DNA, 27 bp, Unknown
  Description of Unknown: gRNA target site sequence
tttctaatattggagactccaccagat

SEQ ID NO: 4026 - DNA, 27 bp, Unknown
  Description of Unknown: gRNA target site sequence
tttccagtatttctaatattggagact

SEQ ID NO: 4027 - DNA, 27 bp, Unknown
  Description of Unknown: gRNA target site sequence
tttgtttccagtatttctaatattgga

SEQ ID NO: 4028 - DNA, 27 bp, Unknown
  Description of Unknown: gRNA target site sequence
tttcagtttgtttccagtatttctaat

SEQ ID NO: 4029 - DNA, 27 bp, Unknown
  Description of Unknown: gRNA target site sequence
tttgtggtttttcagtttgtttccagt

SEQ ID NO: 4030 - DNA, 27 bp, Unknown
  Description of Unknown: gRNA target site sequence
tttgtccttttgtggtttttcagtttg

SEQ ID NO: 4031 - DNA, 27 bp, Unknown
  Description of Unknown: gRNA target site sequence
tttgcaccagccattacctgcaagtca

SEQ ID NO: 4032 - DNA, 27 bp, Unknown
  Description of Unknown: gRNA target site sequence
tttgatttcttcaccactatttgggat

SEQ ID NO: 4033 - DNA, 27 bp, Unknown
  Description of Unknown: gRNA target site sequence
tttcttcaccactatttgggatataac

SEQ ID NO: 4034 - DNA, 27 bp, Unknown
  Description of Unknown: gRNA target site sequence
tttgggatataacgtgggttaacacag

SEQ ID NO: 4035 - DNA, 27 bp, Unknown
  Description of Unknown: gRNA target site sequence
tttataaaggactgctatgtctgtgtt

SEQ ID NO: 4036 - DNA, 27 bp, Unknown
  Description of Unknown: gRNA target site sequence
tttataaatcaattggcatgctgttta

SEQ ID NO: 4037 - DNA, 27 bp, Unknown
  Description of Unknown: gRNA target site sequence
tttaacacaggttcttcacctcccctt

SEQ ID NO: 4038 - DNA, 27 bp, Unknown
  Description of Unknown: gRNA target site sequence
tttcttaccgcctgctttctcagctca

SEQ ID NO: 4039 - DNA, 27 bp, Unknown
  Description of Unknown: gRNA target site sequence
tttctcagctcaactatcacaggcatt

SEQ ID NO: 4040 - DNA, 27 bp, Unknown
  Description of Unknown: gRNA target site sequence
tttcaggaaggcagatcaaaatggctg

SEQ ID NO: 4041 - DNA, 27 bp, Unknown
  Description of Unknown: gRNA target site sequence
tttgatctgccttcctgaaatatagag

SEQ ID NO: 4042 - DNA, 27 bp, Unknown
  Description of Unknown: gRNA target site sequence
tttggaagccacagggaaaagctctat

SEQ ID NO: 4043 - DNA, 27 bp, Unknown
  Description of Unknown: gRNA target site sequence
tttccctgtggcttccaaatgaactat

SEQ ID NO: 4044 - DNA, 27 bp, Unknown
  Description of Unknown: gRNA target site sequence
tttgcaaaatagttcatttggaagcca

SEQ ID NO: 4045 - DNA, 27 bp, Unknown
  Description of Unknown: gRNA target site sequence
tttccccacatttgcaaaatagttcat

SEQ ID NO: 4046 - DNA, 27 bp, Unknown
  Description of Unknown: gRNA target site sequence
tttgcaaatgtggggaaaacacacacc

SEQ ID NO: 4047 - DNA, 20 bp, Unknown
  Description of Unknown: gRNA target site sequence
ggccacccaccttccccagg

SEQ ID NO: 4048 - DNA, 20 bp, Unknown
  Description of Unknown: gRNA target site sequence
gccacccaccttccccaggc

SEQ ID NO: 4049 - DNA, 20 bp, Unknown
  Description of Unknown: gRNA target site sequence
ccacccaccttccccaggca

SEQ ID NO: 4050 - DNA, 20 bp, Unknown
  Description of Unknown: gRNA target site sequence
acccaccttccccaggcagg

SEQ ID NO: 4051 - DNA, 20 bp, Unknown
  Description of Unknown: gRNA target site sequence
cccaccttccccaggcaggg

SEQ ID NO: 4052 - DNA, 20 bp, Unknown
  Description of Unknown: gRNA target site sequence
cttccccaggcagggaggcc

SEQ ID NO: 4053 - DNA, 20 bp, Unknown
  Description of Unknown: gRNA target site sequence
aggcagggaggcccggcccc

SEQ ID NO: 4054 - DNA, 20 bp, Unknown
  Description of Unknown: gRNA target site sequence
ggcagggaggcccggccccc

SEQ ID NO: 4055 - DNA, 20 bp, Unknown
  Description of Unknown: gRNA target site sequence
gcagggaggcccggccccca

SEQ ID NO: 4056 - DNA, 20 bp, Unknown
  Description of Unknown: gRNA target site sequence
agggaggcccggcccccagg

SEQ ID NO: 4057 - DNA, 20 bp, Unknown
  Description of Unknown: gRNA target site sequence
aggcccggcccccagggaga

SEQ ID NO: 4058 - DNA, 20 bp, Unknown
  Description of Unknown: gRNA target site sequence
ggcccggcccccagggagat

SEQ ID NO: 4059 - DNA, 20 bp, Unknown
  Description of Unknown: gRNA target site sequence
gcccggcccccagggagatg

SEQ ID NO: 4060 - DNA, 20 bp, Unknown
  Description of Unknown: gRNA target site sequence
cccggcccccagggagatgg

SEQ ID NO: 4061 - DNA, 20 bp, Unknown
  Description of Unknown: gRNA target site sequence
ccggcccccagggagatggg

SEQ ID NO: 4062 - DNA, 20 bp, Unknown
  Description of Unknown: gRNA target site sequence
cggcccccagggagatgggg

SEQ ID NO: 4063 - DNA, 20 bp, Unknown
  Description of Unknown: gRNA target site sequence
ccccagggagatggggggga

SEQ ID NO: 4064 - DNA, 20 bp, Unknown
  Description of Unknown: gRNA target site sequence
cccagggagatgggggggat

SEQ ID NO: 4065 - DNA, 20 bp, Unknown
  Description of Unknown: gRNA target site sequence
ccagggagatgggggggatg

SEQ ID NO: 4066 - DNA, 20 bp, Unknown
  Description of Unknown: gRNA target site sequence
cagggagatgggggggatgg

SEQ ID NO: 4067 - DNA, 20 bp, Unknown
  Description of Unknown: gRNA target site sequence
gggagatgggggggatgggg

SEQ ID NO: 4068 - DNA, 20 bp, Unknown
  Description of Unknown: gRNA target site sequence
ggagatgggggggatggggg

SEQ ID NO: 4069 - DNA, 20 bp, Unknown
  Description of Unknown: gRNA target site sequence
agatgggggggatgggggag

SEQ ID NO: 4070 - DNA, 20 bp, Unknown
  Description of Unknown: gRNA target site sequence
tgggggggatgggggaggag

SEQ ID NO: 4071 - DNA, 20 bp, Unknown
  Description of Unknown: gRNA target site sequence
gggggggatgggggaggaga

SEQ ID NO: 4072 - DNA, 20 bp, Unknown
  Description of Unknown: gRNA target site sequence
ggggggatgggggaggagaa

SEQ ID NO: 4073 - DNA, 20 bp, Unknown
  Description of Unknown: gRNA target site sequence
gagaagggcctgcccccacc

SEQ ID NO: 4074 - DNA, 20 bp, Unknown
  Description of Unknown: gRNA target site sequence
aagggcctgcccccacccgg

SEQ ID NO: 4075 - DNA, 20 bp, Unknown
  Description of Unknown: gRNA target site sequence
ctgcccccacccggcagcct

SEQ ID NO: 4076 - DNA, 20 bp, Unknown
  Description of Unknown: gRNA target site sequence
tgcccccacccggcagcctc

SEQ ID NO: 4077 - DNA, 20 bp, Unknown
  Description of Unknown: gRNA target site sequence
cccccacccggcagcctcag

SEQ ID NO: 4078 - DNA, 20 bp, Unknown
  Description of Unknown: gRNA target site sequence
ccccacccggcagcctcagg

SEQ ID NO: 4079 - DNA, 20 bp, Unknown
  Description of Unknown: gRNA target site sequence
cccacccggcagcctcagga

SEQ ID NO: 4080 - DNA, 20 bp, Unknown
  Description of Unknown: gRNA target site sequence
ccacccggcagcctcaggag

SEQ ID NO: 4081 - DNA, 20 bp, Unknown
  Description of Unknown: gRNA target site sequence
cccggcagcctcaggagggg

SEQ ID NO: 4082 - DNA, 20 bp, Unknown
  Description of Unknown: gRNA target site sequence
cagcctcaggaggggcagct

SEQ ID NO: 4083 - DNA, 20 bp, Unknown
  Description of Unknown: gRNA target site sequence
agcctcaggaggggcagctc

SEQ ID NO: 4084 - DNA, 20 bp, Unknown
  Description of Unknown: gRNA target site sequence
ctcaggaggggcagctcggg

SEQ ID NO: 4085 - DNA, 20 bp, Unknown
  Description of Unknown: gRNA target site sequence
tcaggaggggcagctcgggc

SEQ ID NO: 4086 - DNA, 20 bp, Unknown
  Description of Unknown: gRNA target site sequence
ggggcagctcgggcgggata

SEQ ID NO: 4087 - DNA, 20 bp, Unknown
  Description of Unknown: gRNA target site sequence
cagctcgggcgggatatgga

SEQ ID NO: 4088 - DNA, 20 bp, Unknown
  Description of Unknown: gRNA target site sequence
gctcgggcgggatatggaaa

SEQ ID NO: 4089 - DNA, 20 bp, Unknown
  Description of Unknown: gRNA target site sequence
ctcgggcgggatatggaaag

SEQ ID NO: 4090 - DNA, 20 bp, Unknown
  Description of Unknown: gRNA target site sequence
cgggatatggaaagaggcca

SEQ ID NO: 4091 - DNA, 20 bp, Unknown
  Description of Unknown: gRNA target site sequence
gatatggaaagaggccacag

SEQ ID NO: 4092 - DNA, 20 bp, Unknown
  Description of Unknown: gRNA target site sequence
tggaaagaggccacagcagt

SEQ ID NO: 4093 - DNA, 20 bp, Unknown
  Description of Unknown: gRNA target site sequence
aaagaggccacagcagtgag

SEQ ID NO: 4094 - DNA, 20 bp, Unknown
  Description of Unknown: gRNA target site sequence
agaggccacagcagtgagca

SEQ ID NO: 4095 - DNA, 20 bp, Unknown
  Description of Unknown: gRNA target site sequence
cacagcagtgagcagagaca

SEQ ID NO: 4096 - DNA, 20 bp, Unknown
  Description of Unknown: gRNA target site sequence
cagcagtgagcagagacaca

SEQ ID NO: 4097 - DNA, 20 bp, Unknown
  Description of Unknown: gRNA target site sequence
agcagtgagcagagacacag

SEQ ID NO: 4098 - DNA, 20 bp, Unknown
  Description of Unknown: gRNA target site sequence
cagtgagcagagacacagag

SEQ ID NO: 4099 - DNA, 20 bp, Unknown
  Description of Unknown: gRNA target site sequence
agtgagcagagacacagagg

SEQ ID NO: 4100 - DNA, 20 bp, Unknown
  Description of Unknown: gRNA target site sequence
gagcagagacacagaggagg

SEQ ID NO: 4101 - DNA, 20 bp, Unknown
  Description of Unknown: gRNA target site sequence
agcagagacacagaggagga

SEQ ID NO: 4102 - DNA, 20 bp, Unknown
  Description of Unknown: gRNA target site sequence
gcagagacacagaggaggaa

SEQ ID NO: 4103 - DNA, 20 bp, Unknown
  Description of Unknown: gRNA target site sequence
cagagacacagaggaggaag

SEQ ID NO: 4104 - DNA, 20 bp, Unknown
  Description of Unknown: gRNA target site sequence
acagaggaggaaggggccct

SEQ ID NO: 4105 - DNA, 20 bp, Unknown
  Description of Unknown: gRNA target site sequence
aggaggaaggggccctgagc

SEQ ID NO: 4106 - DNA, 20 bp, Unknown
  Description of Unknown: gRNA target site sequence
ggaggaaggggccctgagct

SEQ ID NO: 4107 - DNA, 20 bp, Unknown
  Description of Unknown: gRNA target site sequence
gaggaaggggccctgagctg

SEQ ID NO: 4108 - DNA, 20 bp, Unknown
  Description of Unknown: gRNA target site sequence
ggaaggggccctgagctggg

SEQ ID NO: 4109 - DNA, 20 bp, Unknown
  Description of Unknown: gRNA target site sequence
ctgagctggggagaccccca

SEQ ID NO: 4110 - DNA, 20 bp, Unknown
  Description of Unknown: gRNA target site sequence
tgagctggggagacccccac

SEQ ID NO: 4111 - DNA, 20 bp, Unknown
  Description of Unknown: gRNA target site sequence
gagctggggagacccccacg

SEQ ID NO: 4112 - DNA, 20 bp, Unknown
  Description of Unknown: gRNA target site sequence
ctggggagacccccacgggg

SEQ ID NO: 4113 - DNA, 20 bp, Unknown
  Description of Unknown: gRNA target site sequence
tggggagacccccacggggt

SEQ ID NO: 4114 - DNA, 20 bp, Unknown
  Description of Unknown: gRNA target site sequence
ggggagacccccacggggta

SEQ ID NO: 4115 - DNA, 20 bp, Unknown
  Description of Unknown: gRNA target site sequence
gacccccacggggtagggcg

SEQ ID NO: 4116 - DNA, 20 bp, Unknown
  Description of Unknown: gRNA target site sequence
acccccacggggtagggcgt

SEQ ID NO: 4117 - DNA, 20 bp, Unknown
  Description of Unknown: gRNA target site sequence
cccccacggggtagggcgtg

SEQ ID NO: 4118 - DNA, 20 bp, Unknown
  Description of Unknown: gRNA target site sequence
ccccacggggtagggcgtgg

SEQ ID NO: 4119 - DNA, 20 bp, Unknown
  Description of Unknown: gRNA target site sequence
ggggtagggcgtgggggcca

SEQ ID NO: 4120 - DNA, 20 bp, Unknown
  Description of Unknown: gRNA target site sequence
gggtagggcgtgggggccac

SEQ ID NO: 4121 - DNA, 20 bp, Unknown
  Description of Unknown: gRNA target site sequence
tccctcccccaccctctccc

SEQ ID NO: 4122 - DNA, 20 bp, Unknown
  Description of Unknown: gRNA target site sequence
cctcctcacccctcctcccc

SEQ ID NO: 4123 - DNA, 20 bp, Unknown
  Description of Unknown: gRNA target site sequence
ctctgtcactctcgcccacg

SEQ ID NO: 4124 - DNA, 20 bp, Unknown
  Description of Unknown: gRNA target site sequence
cactctcgcccacgtggatg

SEQ ID NO: 4125 - DNA, 20 bp, Unknown
  Description of Unknown: gRNA target site sequence
ctctcgcccacgtggatgtg

SEQ ID NO: 4126 - DNA, 20 bp, Unknown
  Description of Unknown: gRNA target site sequence
tctcgcccacgtggatgtgg

SEQ ID NO: 4127 - DNA, 20 bp, Unknown
  Description of Unknown: gRNA target site sequence
cgcccacgtggatgtggagg

SEQ ID NO: 4128 - DNA, 20 bp, Unknown
  Description of Unknown: gRNA target site sequence
cccacgtggatgtggaggaa

SEQ ID NO: 4129 - DNA, 20 bp, Unknown
  Description of Unknown: gRNA target site sequence
ccacgtggatgtggaggaag

SEQ ID NO: 4130 - DNA, 20 bp, Unknown
  Description of Unknown: gRNA target site sequence
cacgtggatgtggaggaaga

SEQ ID NO: 4131 - DNA, 20 bp, Unknown
  Description of Unknown: gRNA target site sequence
acgtggatgtggaggaagag

SEQ ID NO: 4132 - DNA, 20 bp, Unknown
  Description of Unknown: gRNA target site sequence
cgtggatgtggaggaagagg

SEQ ID NO: 4133 - DNA, 20 bp, Unknown
  Description of Unknown: gRNA target site sequence
ggatgtggaggaagaggggg

SEQ ID NO: 4134 - DNA, 20 bp, Unknown
  Description of Unknown: gRNA target site sequence
gatgtggaggaagagggggc

SEQ ID NO: 4135 - DNA, 20 bp, Unknown
  Description of Unknown: gRNA target site sequence
tgtggaggaagagggggcgg

SEQ ID NO: 4136 - DNA, 20 bp, Unknown
  Description of Unknown: gRNA target site sequence
gaggaagagggggcgggagc

SEQ ID NO: 4137 - DNA, 20 bp, Unknown
  Description of Unknown: gRNA target site sequence
aggaagagggggcgggagca

SEQ ID NO: 4138 - DNA, 20 bp, Unknown
  Description of Unknown: gRNA target site sequence
ggaagagggggcgggagcaa

SEQ ID NO: 4139 - DNA, 20 bp, Unknown
  Description of Unknown: gRNA target site sequence
gaagagggggcgggagcaag

SEQ ID NO: 4140 - DNA, 20 bp, Unknown
  Description of Unknown: gRNA target site sequence
gagggggcgggagcaagggg

SEQ ID NO: 4141 - DNA, 20 bp, Unknown
  Description of Unknown: gRNA target site sequence
agggggcgggagcaaggggc

SEQ ID NO: 4142 - DNA, 20 bp, Unknown
  Description of Unknown: gRNA target site sequence
accctcccttcaacctgacc

SEQ ID NO: 4143 - DNA, 20 bp, Unknown
  Description of Unknown: gRNA target site sequence
ccctcccttcaacctgacct

SEQ ID NO: 4144 - DNA, 20 bp, Unknown
  Description of Unknown: gRNA target site sequence
cccttcaacctgacctggga

SEQ ID NO: 4145 - DNA, 20 bp, Unknown
  Description of Unknown: gRNA target site sequence
ccttccgctcacctccgcct

SEQ ID NO: 4146 - DNA, 20 bp, Unknown
  Description of Unknown: gRNA target site sequence
tccgctcacctccgcctgag

SEQ ID NO: 4147 - DNA, 20 bp, Unknown
  Description of Unknown: gRNA target site sequence
gctcacctccgcctgagcag

SEQ ID NO: 4148 - DNA, 20 bp, Unknown
  Description of Unknown: gRNA target site sequence
tcacctccgcctgagcagtg

SEQ ID NO: 4149 - DNA, 20 bp, Unknown
  Description of Unknown: gRNA target site sequence
cctccgcctgagcagtggag

SEQ ID NO: 4150 - DNA, 20 bp, Unknown
  Description of Unknown: gRNA target site sequence
ctccgcctgagcagtggaga

SEQ ID NO: 4151 - DNA, 20 bp, Unknown
  Description of Unknown: gRNA target site sequence
cgcctgagcagtggagaagg

SEQ ID NO: 4152 - DNA, 20 bp, Unknown
  Description of Unknown: gRNA target site sequence
cagtggagaaggcggcactc

SEQ ID NO: 4153 - DNA, 20 bp, Unknown
  Description of Unknown: gRNA target site sequence
tggagaaggcggcactctgg

SEQ ID NO: 4154 - DNA, 20 bp, Unknown
  Description of Unknown: gRNA target site sequence
ggagaaggcggcactctggt

SEQ ID NO: 4155 - DNA, 20 bp, Unknown
  Description of Unknown: gRNA target site sequence
gagaaggcggcactctggtg

SEQ ID NO: 4156 - DNA, 20 bp, Unknown
  Description of Unknown: gRNA target site sequence
gcactctggtggggctgctc

SEQ ID NO: 4157 - DNA, 20 bp, Unknown
  Description of Unknown: gRNA target site sequence
cactctggtggggctgctcc

SEQ ID NO: 4158 - DNA, 20 bp, Unknown
  Description of Unknown: gRNA target site sequence
gtggggctgctccaggcatg

SEQ ID NO: 4159 - DNA, 20 bp, Unknown
  Description of Unknown: gRNA target site sequence
ctccaggcatgcagatccca

SEQ ID NO: 4160 - DNA, 20 bp, Unknown
  Description of Unknown: gRNA target site sequence
tccaggcatgcagatcccac

SEQ ID NO: 4161 - DNA, 20 bp, Unknown
  Description of Unknown: gRNA target site sequence
tgcagatcccacaggcgccc

SEQ ID NO: 4162 - DNA, 20 bp, Unknown
  Description of Unknown: gRNA target site sequence
gatcccacaggcgccctggc

SEQ ID NO: 4163 - DNA, 20 bp, Unknown
  Description of Unknown: gRNA target site sequence
aggcgccctggccagtcgtc

SEQ ID NO: 4164 - DNA, 20 bp, Unknown
  Description of Unknown: gRNA target site sequence
ggcgccctggccagtcgtct

SEQ ID NO: 4165 - DNA, 20 bp, Unknown
  Description of Unknown: gRNA target site sequence
gccctggccagtcgtctggg

SEQ ID NO: 4166 - DNA, 20 bp, Unknown
  Description of Unknown: gRNA target site sequence
cgtctgggcggtgctacaac

SEQ ID NO: 4167 - DNA, 20 bp, Unknown
  Description of Unknown: gRNA target site sequence
gtctgggcggtgctacaact

SEQ ID NO: 4168 - DNA, 20 bp, Unknown
  Description of Unknown: gRNA target site sequence
gggcggtgctacaactgggc

SEQ ID NO: 4169 - DNA, 20 bp, Unknown
  Description of Unknown: gRNA target site sequence
cggtgctacaactgggctgg

SEQ ID NO: 4170 - DNA, 20 bp, Unknown
  Description of Unknown: gRNA target site sequence
gctacaactgggctggcggc

SEQ ID NO: 4171 - DNA, 20 bp, Unknown
  Description of Unknown: gRNA target site sequence
ctacaactgggctggcggcc

SEQ ID NO: 4172 - DNA, 20 bp, Unknown
  Description of Unknown: gRNA target site sequence
aactgggctggcggccagga

SEQ ID NO: 4173 - DNA, 20 bp, Unknown
  Description of Unknown: gRNA target site sequence
ctggcggccaggatggttct

SEQ ID NO: 4174 - DNA, 20 bp, Unknown
  Description of Unknown: gRNA target site sequence
tggcggccaggatggttctt

SEQ ID NO: 4175 - DNA, 20 bp, Unknown
  Description of Unknown: gRNA target site sequence
cggccaggatggttcttagg

SEQ ID NO: 4176 - DNA, 20 bp, Unknown
  Description of Unknown: gRNA target site sequence
ggccaggatggttcttaggt

SEQ ID NO: 4177 - DNA, 20 bp, Unknown
  Description of Unknown: gRNA target site sequence
caggatggttcttaggtagg

SEQ ID NO: 4178 - DNA, 20 bp, Unknown
  Description of Unknown: gRNA target site sequence
aggatggttcttaggtaggt

SEQ ID NO: 4179 - DNA, 20 bp, Unknown
  Description of Unknown: gRNA target site sequence
ggatggttcttaggtaggtg

SEQ ID NO: 4180 - DNA, 20 bp, Unknown
  Description of Unknown: gRNA target site sequence
ggttcttaggtaggtggggt

SEQ ID NO: 4181 - DNA, 20 bp, Unknown
  Description of Unknown: gRNA target site sequence
tcttaggtaggtggggtcgg

SEQ ID NO: 4182 - DNA, 20 bp, Unknown
  Description of Unknown: gRNA target site sequence
aggtaggtggggtcggcggt

SEQ ID NO: 4183 - DNA, 20 bp, Unknown
  Description of Unknown: gRNA target site sequence
ggtaggtggggtcggcggtc

SEQ ID NO: 4184 - DNA, 20 bp, Unknown
  Description of Unknown: gRNA target site sequence
gggtcggcggtcaggtgtcc

SEQ ID NO: 4185 - DNA, 20 bp, Unknown
  Description of Unknown: gRNA target site sequence
gtcggcggtcaggtgtccca

SEQ ID NO: 4186 - DNA, 20 bp, Unknown
  Description of Unknown: gRNA target site sequence
gcggtcaggtgtcccagagc

SEQ ID NO: 4187 - DNA, 20 bp, Unknown
  Description of Unknown: gRNA target site sequence
cggtcaggtgtcccagagcc

SEQ ID NO: 4188 - DNA, 20 bp, Unknown
  Description of Unknown: gRNA target site sequence
ggtcaggtgtcccagagcca

SEQ ID NO: 4189 - DNA, 20 bp, Unknown
  Description of Unknown: gRNA target site sequence
gtcaggtgtcccagagccag

SEQ ID NO: 4190 - DNA, 20 bp, Unknown
  Description of Unknown: gRNA target site sequence
gtgtcccagagccaggggtc

SEQ ID NO: 4191 - DNA, 20 bp, Unknown
  Description of Unknown: gRNA target site sequence
gtcccagagccaggggtctg

SEQ ID NO: 4192 - DNA, 20 bp, Unknown
  Description of Unknown: gRNA target site sequence
tcccagagccaggggtctgg

SEQ ID NO: 4193 - DNA, 20 bp, Unknown
  Description of Unknown: gRNA target site sequence
cccagagccaggggtctgga

SEQ ID NO: 4194 - DNA, 20 bp, Unknown
  Description of Unknown: gRNA target site sequence
ctggagggaccttccaccct

SEQ ID NO: 4195 - DNA, 20 bp, Unknown
  Description of Unknown: gRNA target site sequence
gaccttccaccctcagtccc

SEQ ID NO: 4196 - DNA, 20 bp, Unknown
  Description of Unknown: gRNA target site sequence
cttccaccctcagtccctgg

SEQ ID NO: 4197 - DNA, 20 bp, Unknown
  Description of Unknown: gRNA target site sequence
ttccaccctcagtccctggc

SEQ ID NO: 4198 - DNA, 20 bp, Unknown
  Description of Unknown: gRNA target site sequence
accctcagtccctggcaggt

SEQ ID NO: 4199 - DNA, 20 bp, Unknown
  Description of Unknown: gRNA target site sequence
ccctcagtccctggcaggtc

SEQ ID NO: 4200 - DNA, 20 bp, Unknown
  Description of Unknown: gRNA target site sequence
cctcagtccctggcaggtcg

SEQ ID NO: 4201 - DNA, 20 bp, Unknown
  Description of Unknown: gRNA target site sequence
ctcagtccctggcaggtcgg

SEQ ID NO: 4202 - DNA, 20 bp, Unknown
  Description of Unknown: gRNA target site sequence
tcagtccctggcaggtcggg

SEQ ID NO: 4203 - DNA, 20 bp, Unknown
  Description of Unknown: gRNA target site sequence
ctggcaggtcggggggtgct

SEQ ID NO: 4204 - DNA, 20 bp, Unknown
  Description of Unknown: gRNA target site sequence
tggcaggtcggggggtgctg

SEQ ID NO: 4205 - DNA, 20 bp, Unknown
  Description of Unknown: gRNA target site sequence
caggtcggggggtgctgagg

SEQ ID NO: 4206 - DNA, 20 bp, Unknown
  Description of Unknown: gRNA target site sequence
aggtcggggggtgctgaggc

SEQ ID NO: 4207 - DNA, 20 bp, Unknown
  Description of Unknown: gRNA target site sequence
ggggggtgctgaggcgggcc

SEQ ID NO: 4208 - DNA, 20 bp, Unknown
  Description of Unknown: gRNA target site sequence
tgctgaggcgggcctggccc

SEQ ID NO: 4209 - DNA, 20 bp, Unknown
  Description of Unknown: gRNA target site sequence
tgaggcgggcctggccctgg

SEQ ID NO: 4210 - DNA, 20 bp, Unknown
  Description of Unknown: gRNA target site sequence
cgggcctggccctggcagcc

SEQ ID NO: 4211 - DNA, 20 bp, Unknown
  Description of Unknown: gRNA target site sequence
gggcctggccctggcagccc

SEQ ID NO: 4212 - DNA, 20 bp, Unknown
  Description of Unknown: gRNA target site sequence
ggcctggccctggcagccca

SEQ ID NO: 4213 - DNA, 20 bp, Unknown
  Description of Unknown: gRNA target site sequence
gcctggccctggcagcccag

SEQ ID NO: 4214 - DNA, 20 bp, Unknown
  Description of Unknown: gRNA target site sequence
ccctggcagcccaggggtcc

SEQ ID NO: 4215 - DNA, 20 bp, Unknown
  Description of Unknown: gRNA target site sequence
ctggcagcccaggggtcccg

SEQ ID NO: 4216 - DNA, 20 bp, Unknown
  Description of Unknown: gRNA target site sequence
cagcccaggggtcccggagc

SEQ ID NO: 4217 - DNA, 20 bp, Unknown
  Description of Unknown: gRNA target site sequence
agcccaggggtcccggagcg

SEQ ID NO: 4218 - DNA, 20 bp, Unknown
  Description of Unknown: gRNA target site sequence
gcccaggggtcccggagcga

SEQ ID NO: 4219 - DNA, 20 bp, Unknown
  Description of Unknown: gRNA target site sequence
cccaggggtcccggagcgag

SEQ ID NO: 4220 - DNA, 20 bp, Unknown
  Description of Unknown: gRNA target site sequence
gggtcccggagcgaggggtc

SEQ ID NO: 4221 - DNA, 20 bp, Unknown
  Description of Unknown: gRNA target site sequence
gtcccggagcgaggggtctg

SEQ ID NO: 4222 - DNA, 20 bp, Unknown
  Description of Unknown: gRNA target site sequence
tcccggagcgaggggtctgg

SEQ ID NO: 4223 - DNA, 20 bp, Unknown
  Description of Unknown: gRNA target site sequence
cccggagcgaggggtctgga

SEQ ID NO: 4224 - DNA, 20 bp, Unknown
  Description of Unknown: gRNA target site sequence
ctggagggacctttcactct

SEQ ID NO: 4225 - DNA, 20 bp, Unknown
  Description of Unknown: gRNA target site sequence
gacctttcactctcagtccc

SEQ ID NO: 4226 - DNA, 20 bp, Unknown
  Description of Unknown: gRNA target site sequence
ctttcactctcagtccctgg

SEQ ID NO: 4227 - DNA, 20 bp, Unknown
  Description of Unknown: gRNA target site sequence
tttcactctcagtccctggc

SEQ ID NO: 4228 - DNA, 20 bp, Unknown
  Description of Unknown: gRNA target site sequence
actctcagtccctggcaggt

SEQ ID NO: 4229 - DNA, 20 bp, Unknown
  Description of Unknown: gRNA target site sequence
ctctcagtccctggcaggtc

SEQ ID NO: 4230 - DNA, 20 bp, Unknown
  Description of Unknown: gRNA target site sequence
tctcagtccctggcaggtcg

SEQ ID NO: 4231 - DNA, 20 bp, Unknown
  Description of Unknown: gRNA target site sequence
ctcagtccctggcaggtcgg

SEQ ID NO: 4232 - DNA, 20 bp, Unknown
  Description of Unknown: gRNA target site sequence
tcagtccctggcaggtcggg

SEQ ID NO: 4233 - DNA, 20 bp, Unknown
  Description of Unknown: gRNA target site sequence
tggcaggtcggggggtgctg

SEQ ID NO: 4234 - DNA, 20 bp, Unknown
  Description of Unknown: gRNA target site sequence
caggtcggggggtgctgtgg

SEQ ID NO: 4235 - DNA, 20 bp, Unknown
  Description of Unknown: gRNA target site sequence
aggtcggggggtgctgtggc

SEQ ID NO: 4236 - DNA, 20 bp, Unknown
  Description of Unknown: gRNA target site sequence
ggggggtgctgtggcaggcc

SEQ ID NO: 4237 - DNA, 20 bp, Unknown
  Description of Unknown: gRNA target site sequence
tgctgtggcaggcccagcct

SEQ ID NO: 4238 - DNA, 20 bp, Unknown
  Description of Unknown: gRNA target site sequence
gcaggcccagccttggcccc

SEQ ID NO: 4239 - DNA, 20 bp, Unknown
  Description of Unknown: gRNA target site sequence
ccagctctgccccttaccct

SEQ ID NO: 4240 - DNA, 20 bp, Unknown
  Description of Unknown: gRNA target site sequence
gccccttaccctgagctgtg

SEQ ID NO: 4241 - DNA, 20 bp, Unknown
  Description of Unknown: gRNA target site sequence
taccctgagctgtgtggctt

SEQ ID NO: 4242 - DNA, 20 bp, Unknown
  Description of Unknown: gRNA target site sequence
accctgagctgtgtggcttt

SEQ ID NO: 4243 - DNA, 20 bp, Unknown
  Description of Unknown: gRNA target site sequence
ctgagctgtgtggctttggg

SEQ ID NO: 4244 - DNA, 20 bp, Unknown
  Description of Unknown: gRNA target site sequence
ctttgggcagctcgaactcc

SEQ ID NO: 4245 - DNA, 20 bp, Unknown
  Description of Unknown: gRNA target site sequence
tttgggcagctcgaactcct

SEQ ID NO: 4246 - DNA, 20 bp, Unknown
  Description of Unknown: gRNA target site sequence
cgaactcctgggttcctctc

SEQ ID NO: 4247 - DNA, 20 bp, Unknown
  Description of Unknown: gRNA target site sequence
gaactcctgggttcctctct

SEQ ID NO: 4248 - DNA, 20 bp, Unknown
  Description of Unknown: gRNA target site sequence
ctgggccccaactcctcccc

SEQ ID NO: 4249 - DNA, 20 bp, Unknown
  Description of Unknown: gRNA target site sequence
cccaactcctcccctggccc

SEQ ID NO: 4250 - DNA, 20 bp, Unknown
  Description of Unknown: gRNA target site sequence
ccaagtcccctctttgctcc

SEQ ID NO: 4251 - DNA, 20 bp, Unknown
  Description of Unknown: gRNA target site sequence
caagtcccctctttgctcct

SEQ ID NO: 4252 - DNA, 20 bp, Unknown
  Description of Unknown: gRNA target site sequence
gtcccctctttgctcctggg

SEQ ID NO: 4253 - DNA, 20 bp, Unknown
  Description of Unknown: gRNA target site sequence
tcccctctttgctcctgggc

SEQ ID NO: 4254 - DNA, 20 bp, Unknown
  Description of Unknown: gRNA target site sequence
cctctttgctcctgggcagg

SEQ ID NO: 4255 - DNA, 20 bp, Unknown
  Description of Unknown: gRNA target site sequence
ctctttgctcctgggcaggc

SEQ ID NO: 4256 - DNA, 20 bp, Unknown
  Description of Unknown: gRNA target site sequence
gcaggacctctgtcccctct

SEQ ID NO: 4257 - DNA, 20 bp, Unknown
  Description of Unknown: gRNA target site sequence
gacctctgtcccctctcagc

SEQ ID NO: 4258 - DNA, 20 bp, Unknown
  Description of Unknown: gRNA target site sequence
gtcccctctcagccggtcct

SEQ ID NO: 4259 - DNA, 20 bp, Unknown
  Description of Unknown: gRNA target site sequence
tcccctctcagccggtcctt

SEQ ID NO: 4260 - DNA, 20 bp, Unknown
  Description of Unknown: gRNA target site sequence
cccctctcagccggtccttg

SEQ ID NO: 4261 - DNA, 20 bp, Unknown
  Description of Unknown: gRNA target site sequence
cttggggctgcgtgtttctg

SEQ ID NO: 4262 - DNA, 20 bp, Unknown
  Description of Unknown: gRNA target site sequence
tgcgtgtttctgtagaatga

SEQ ID NO: 4263 - DNA, 20 bp, Unknown
  Description of Unknown: gRNA target site sequence
gcgtgtttctgtagaatgac

SEQ ID NO: 4264 - DNA, 20 bp, Unknown
  Description of Unknown: gRNA target site sequence
gtttctgtagaatgacgggt

SEQ ID NO: 4265 - DNA, 20 bp, Unknown
  Description of Unknown: gRNA target site sequence
tttctgtagaatgacgggtc

SEQ ID NO: 4266 - DNA, 20 bp, Unknown
  Description of Unknown: gRNA target site sequence
tgtagaatgacgggtcaggc

SEQ ID NO: 4267 - DNA, 20 bp, Unknown
  Description of Unknown: gRNA target site sequence
gaatgacgggtcaggctggc

SEQ ID NO: 4268 - DNA, 20 bp, Unknown
  Description of Unknown: gRNA target site sequence
ctggccagaaccccaaacct

SEQ ID NO: 4269 - DNA, 20 bp, Unknown
  Description of Unknown: gRNA target site sequence
agaaccccaaaccttggccg

SEQ ID NO: 4270 - DNA, 20 bp, Unknown
  Description of Unknown: gRNA target site sequence
gaaccccaaaccttggccgt

SEQ ID NO: 4271 - DNA, 20 bp, Unknown
  Description of Unknown: gRNA target site sequence
aaccccaaaccttggccgtg

SEQ ID NO: 4272 - DNA, 20 bp, Unknown
  Description of Unknown: gRNA target site sequence
ccccaaaccttggccgtggg

SEQ ID NO: 4273 - DNA, 20 bp, Unknown
  Description of Unknown: gRNA target site sequence
ttggccgtggggagtctgcg

SEQ ID NO: 4274 - DNA, 20 bp, Unknown
  Description of Unknown: gRNA target site sequence
gccgtggggagtctgcgtgg

SEQ ID NO: 4275 - DNA, 20 bp, Unknown
  Description of Unknown: gRNA target site sequence
cgtggcggctctgccttgcc

SEQ ID NO: 4276 - DNA, 20 bp, Unknown
  Description of Unknown: gRNA target site sequence
gtggcggctctgccttgccc

SEQ ID NO: 4277 - DNA, 20 bp, Unknown
  Description of Unknown: gRNA target site sequence
ctgccttgcccaggcatcct

SEQ ID NO: 4278 - DNA, 20 bp, Unknown
  Description of Unknown: gRNA target site sequence
ggcatccttggtcctcactc

SEQ ID NO: 4279 - DNA, 20 bp, Unknown
  Description of Unknown: gRNA target site sequence
gtcctcactcgagttttcct

SEQ ID NO: 4280 - DNA, 20 bp, Unknown
  Description of Unknown: gRNA target site sequence
tcctcactcgagttttccta

SEQ ID NO: 4281 - DNA, 20 bp, Unknown
  Description of Unknown: gRNA target site sequence
cactcgagttttcctaagga

SEQ ID NO: 4282 - DNA, 20 bp, Unknown
  Description of Unknown: gRNA target site sequence
actcgagttttcctaaggat

SEQ ID NO: 4283 - DNA, 20 bp, Unknown
  Description of Unknown: gRNA target site sequence
agttttcctaaggatgggat

SEQ ID NO: 4284 - DNA, 20 bp, Unknown
  Description of Unknown: gRNA target site sequence
aggatgggatgagccccatg

SEQ ID NO: 4285 - DNA, 20 bp, Unknown
  Description of Unknown: gRNA target site sequence
ggatgggatgagccccatgt

SEQ ID NO: 4286 - DNA, 20 bp, Unknown
  Description of Unknown: gRNA target site sequence
gccccatgtgggactaacct

SEQ ID NO: 4287 - DNA, 20 bp, Unknown
  Description of Unknown: gRNA target site sequence
accttggctttacgacgtca

SEQ ID NO: 4288 - DNA, 20 bp, Unknown
  Description of Unknown: gRNA target site sequence
ggctttacgacgtcaaagtt

SEQ ID NO: 4289 - DNA, 20 bp, Unknown
  Description of Unknown: gRNA target site sequence
tacgacgtcaaagtttagat

SEQ ID NO: 4290 - DNA, 20 bp, Unknown
  Description of Unknown: gRNA target site sequence
acgtcaaagtttagatgagc

SEQ ID NO: 4291 - DNA, 20 bp, Unknown
  Description of Unknown: gRNA target site sequence
tatttttctcattatatcca

SEQ ID NO: 4292 - DNA, 20 bp, Unknown
  Description of Unknown: gRNA target site sequence
tatccaaagtgtacctgttc

SEQ ID NO: 4293 - DNA, 20 bp, Unknown
  Description of Unknown: gRNA target site sequence
caaagtgtacctgttcgagt

SEQ ID NO: 4294 - DNA, 20 bp, Unknown
  Description of Unknown: gRNA target site sequence
aaagtgtacctgttcgagtg

SEQ ID NO: 4295 - DNA, 20 bp, Unknown
  Description of Unknown: gRNA target site sequence
tgtacctgttcgagtgagga

SEQ ID NO: 4296 - DNA, 20 bp, Unknown
  Description of Unknown: gRNA target site sequence
gaggacagttcttctgtctc

SEQ ID NO: 4297 - DNA, 20 bp, Unknown
  Description of Unknown: gRNA target site sequence
aggacagttcttctgtctcc

SEQ ID NO: 4298 - DNA, 20 bp, Unknown
  Description of Unknown: gRNA target site sequence
tctgtctccaggatccctcc

SEQ ID NO: 4299 - DNA, 20 bp, Unknown
  Description of Unknown: gRNA target site sequence
ctgtctccaggatccctcct

SEQ ID NO: 4300 - DNA, 20 bp, Unknown
  Description of Unknown: gRNA target site sequence
tctccaggatccctcctggg

SEQ ID NO: 4301 - DNA, 20 bp, Unknown
  Description of Unknown: gRNA target site sequence
ctccaggatccctcctgggt

SEQ ID NO: 4302 - DNA, 20 bp, Unknown
  Description of Unknown: gRNA target site sequence
tccaggatccctcctgggtg

SEQ ID NO: 4303 - DNA, 20 bp, Unknown
  Description of Unknown: gRNA target site sequence
gggtggggattgtgcccgcc

SEQ ID NO: 4304 - DNA, 20 bp, Unknown
  Description of Unknown: gRNA target site sequence
ggtggggattgtgcccgcct

SEQ ID NO: 4305 - DNA, 20 bp, Unknown
  Description of Unknown: gRNA target site sequence
tgcccgcctgggtctctgcc

SEQ ID NO: 4306 - DNA, 20 bp, Unknown
  Description of Unknown: gRNA target site sequence
ctgggtctctgcccagattc

SEQ ID NO: 4307 - DNA, 20 bp, Unknown
  Description of Unknown: gRNA target site sequence
tgggtctctgcccagattcc

SEQ ID NO: 4308 - DNA, 20 bp, Unknown
  Description of Unknown: gRNA target site sequence
gggtctctgcccagattcca

SEQ ID NO: 4309 - DNA, 20 bp, Unknown
  Description of Unknown: gRNA target site sequence
cagattccagggctctcccc

SEQ ID NO: 4310 - DNA, 20 bp, Unknown
  Description of Unknown: gRNA target site sequence
ggctctccccgagccctgtt

SEQ ID NO: 4311 - DNA, 20 bp, Unknown
  Description of Unknown: gRNA target site sequence
agccctgttcagaccatccg

SEQ ID NO: 4312 - DNA, 20 bp, Unknown
  Description of Unknown: gRNA target site sequence
gccctgttcagaccatccgt

SEQ ID NO: 4313 - DNA, 20 bp, Unknown
  Description of Unknown: gRNA target site sequence
ccctgttcagaccatccgtg

SEQ ID NO: 4314 - DNA, 20 bp, Unknown
  Description of Unknown: gRNA target site sequence
cctgttcagaccatccgtgg

SEQ ID NO: 4315 - DNA, 20 bp, Unknown
  Description of Unknown: gRNA target site sequence
tgttcagaccatccgtgggg

SEQ ID NO: 4316 - DNA, 20 bp, Unknown
  Description of Unknown: gRNA target site sequence
gttcagaccatccgtggggg

SEQ ID NO: 4317 - DNA, 20 bp, Unknown
  Description of Unknown: gRNA target site sequence
accatccgtgggggaggcct

SEQ ID NO: 4318 - DNA, 20 bp, Unknown
  Description of Unknown: gRNA target site sequence
aggccttggcctcactctcc

SEQ ID NO: 4319 - DNA, 20 bp, Unknown
  Description of Unknown: gRNA target site sequence
tggcctcactctcccggatc

SEQ ID NO: 4320 - DNA, 20 bp, Unknown
  Description of Unknown: gRNA target site sequence
ggcctcactctcccggatcg

SEQ ID NO: 4321 - DNA, 20 bp, Unknown
  Description of Unknown: gRNA target site sequence
cctcactctcccggatcgag

SEQ ID NO: 4322 - DNA, 20 bp, Unknown
  Description of Unknown: gRNA target site sequence
tcactctcccggatcgagga

SEQ ID NO: 4323 - DNA, 20 bp, Unknown
  Description of Unknown: gRNA target site sequence
actctcccggatcgaggaga

SEQ ID NO: 4324 - DNA, 20 bp, Unknown
  Description of Unknown: gRNA target site sequence
ctctcccggatcgaggagag

SEQ ID NO: 4325 - DNA, 20 bp, Unknown
  Description of Unknown: gRNA target site sequence
tctcccggatcgaggagaga

SEQ ID NO: 4326 - DNA, 20 bp, Unknown
  Description of Unknown: gRNA target site sequence
tcccggatcgaggagagagg

SEQ ID NO: 4327 - DNA, 20 bp, Unknown
  Description of Unknown: gRNA target site sequence
ggagagagggagcctcttcc

SEQ ID NO: 4328 - DNA, 20 bp, Unknown
  Description of Unknown: gRNA target site sequence
gagagagggagcctcttcct

SEQ ID NO: 4329 - DNA, 20 bp, Unknown
  Description of Unknown: gRNA target site sequence
tcctgggctgcccgtgaccc

SEQ ID NO: 4330 - DNA, 20 bp, Unknown
  Description of Unknown: gRNA target site sequence
cctgggctgcccgtgaccct

SEQ ID NO: 4331 - DNA, 20 bp, Unknown
  Description of Unknown: gRNA target site sequence
ctctgtgtacactgtgacca

SEQ ID NO: 4332 - DNA, 20 bp, Unknown
  Description of Unknown: gRNA target site sequence
ctgtgaccacagcccgctcc

SEQ ID NO: 4333 - DNA, 20 bp, Unknown
  Description of Unknown: gRNA target site sequence
gctcctggaccctctgtgcc

SEQ ID NO: 4334 - DNA, 20 bp, Unknown
  Description of Unknown: gRNA target site sequence
ctggaccctctgtgcccggc

SEQ ID NO: 4335 - DNA, 20 bp, Unknown
  Description of Unknown: gRNA target site sequence
cccggctggccctctgtgcc

SEQ ID NO: 4336 - DNA, 20 bp, Unknown
  Description of Unknown: gRNA target site sequence
gctggccctctgtgcccagc

SEQ ID NO: 4337 - DNA, 20 bp, Unknown
  Description of Unknown: gRNA target site sequence
gtgcccagccagcctgcacc

SEQ ID NO: 4338 - DNA, 20 bp, Unknown
  Description of Unknown: gRNA target site sequence
tgcccagccagcctgcacct

SEQ ID NO: 4339 - DNA, 20 bp, Unknown
  Description of Unknown: gRNA target site sequence
gcccagccagcctgcacctg

SEQ ID NO: 4340 - DNA, 20 bp, Unknown
  Description of Unknown: gRNA target site sequence
agcctgcacctggggatgcc

SEQ ID NO: 4341 - DNA, 20 bp, Unknown
  Description of Unknown: gRNA target site sequence
gcctgcacctggggatgcca

SEQ ID NO: 4342 - DNA, 20 bp, Unknown
  Description of Unknown: gRNA target site sequence
cacctggggatgccaaggcc

SEQ ID NO: 4343 - DNA, 20 bp, Unknown
  Description of Unknown: gRNA target site sequence
acctggggatgccaaggcct

SEQ ID NO: 4344 - DNA, 20 bp, Unknown
  Description of Unknown: gRNA target site sequence
cctggggatgccaaggcctg

SEQ ID NO: 4345 - DNA, 20 bp, Unknown
  Description of Unknown: gRNA target site sequence
tggggatgccaaggcctggg

SEQ ID NO: 4346 - DNA, 20 bp, Unknown
  Description of Unknown: gRNA target site sequence
ggggatgccaaggcctgggg

SEQ ID NO: 4347 - DNA, 20 bp, Unknown
  Description of Unknown: gRNA target site sequence
gggatgccaaggcctgggga

SEQ ID NO: 4348 - DNA, 20 bp, Unknown
  Description of Unknown: gRNA target site sequence
atgccaaggcctggggaggg

SEQ ID NO: 4349 - DNA, 20 bp, Unknown
  Description of Unknown: gRNA target site sequence
ctggggagggtggtttcacc

SEQ ID NO: 4350 - DNA, 20 bp, Unknown
  Description of Unknown: gRNA target site sequence
tggggagggtggtttcaccc

SEQ ID NO: 4351 - DNA, 20 bp, Unknown
  Description of Unknown: gRNA target site sequence
agggtggtttcacccaggcc

SEQ ID NO: 4352 - DNA, 20 bp, Unknown
  Description of Unknown: gRNA target site sequence
gtttcacccaggccaagcct

SEQ ID NO: 4353 - DNA, 20 bp, Unknown
  Description of Unknown: gRNA target site sequence
cacccaggccaagcctaaga

SEQ ID NO: 4354 - DNA, 20 bp, Unknown
  Description of Unknown: gRNA target site sequence
caagcctaagacagtccctc

SEQ ID NO: 4355 - DNA, 20 bp, Unknown
  Description of Unknown: gRNA target site sequence
aagcctaagacagtccctct

SEQ ID NO: 4356 - DNA, 20 bp, Unknown
  Description of Unknown: gRNA target site sequence
acagtccctctgggccctgc

SEQ ID NO: 4357 - DNA, 20 bp, Unknown
  Description of Unknown: gRNA target site sequence
cagtccctctgggccctgct

SEQ ID NO: 4358 - DNA, 20 bp, Unknown
  Description of Unknown: gRNA target site sequence
ctctgggccctgctgggtac

SEQ ID NO: 4359 - DNA, 20 bp, Unknown
  Description of Unknown: gRNA target site sequence
tctgggccctgctgggtacc

SEQ ID NO: 4360 - DNA, 20 bp, Unknown
  Description of Unknown: gRNA target site sequence
ctgggccctgctgggtaccg

SEQ ID NO: 4361 - DNA, 20 bp, Unknown
  Description of Unknown: gRNA target site sequence
gtaccggggtgtgacaccac

SEQ ID NO: 4362 - DNA, 20 bp, Unknown
  Description of Unknown: gRNA target site sequence
taccggggtgtgacaccact

SEQ ID NO: 4363 - DNA, 20 bp, Unknown
  Description of Unknown: gRNA target site sequence
ccggggtgtgacaccactgg

SEQ ID NO: 4364 - DNA, 20 bp, Unknown
  Description of Unknown: gRNA target site sequence
cggggtgtgacaccactggg

SEQ ID NO: 4365 - DNA, 20 bp, Unknown
  Description of Unknown: gRNA target site sequence
tgtgacaccactgggaggac

SEQ ID NO: 4366 - DNA, 20 bp, Unknown
  Description of Unknown: gRNA target site sequence
caccactgggaggacaagat

SEQ ID NO: 4367 - DNA, 20 bp, Unknown
  Description of Unknown: gRNA target site sequence
accactgggaggacaagatg

SEQ ID NO: 4368 - DNA, 20 bp, Unknown
  Description of Unknown: gRNA target site sequence
ccactgggaggacaagatga

SEQ ID NO: 4369 - DNA, 20 bp, Unknown
  Description of Unknown: gRNA target site sequence
cactgggaggacaagatgag

SEQ ID NO: 4370 - DNA, 20 bp, Unknown
  Description of Unknown: gRNA target site sequence
gacaagatgaggggcacccc

SEQ ID NO: 4371 - DNA, 20 bp, Unknown
  Description of Unknown: gRNA target site sequence
acaagatgaggggcacccct

SEQ ID NO: 4372 - DNA, 20 bp, Unknown
  Description of Unknown: gRNA target site sequence
caagatgaggggcacccctg

SEQ ID NO: 4373 - DNA, 20 bp, Unknown
  Description of Unknown: gRNA target site sequence
ggccgccctgacaccccctc

SEQ ID NO: 4374 - DNA, 20 bp, Unknown
  Description of Unknown: gRNA target site sequence
gccgccctgacaccccctcg

SEQ ID NO: 4375 - DNA, 20 bp, Unknown
  Description of Unknown: gRNA target site sequence
ccccctcgaggctcctgccc

SEQ ID NO: 4376 - DNA, 20 bp, Unknown
  Description of Unknown: gRNA target site sequence
cccctcgaggctcctgcccc

SEQ ID NO: 4377 - DNA, 20 bp, Unknown
  Description of Unknown: gRNA target site sequence
ccctcgaggctcctgccccg

SEQ ID NO: 4378 - DNA, 20 bp, Unknown
  Description of Unknown: gRNA target site sequence
cctcgaggctcctgccccgg

SEQ ID NO: 4379 - DNA, 20 bp, Unknown
  Description of Unknown: gRNA target site sequence
ggctcctgccccgggggtcc

SEQ ID NO: 4380 - DNA, 20 bp, Unknown
  Description of Unknown: gRNA target site sequence
gtcctggtgccccttcactg

SEQ ID NO: 4381 - DNA, 20 bp, Unknown
  Description of Unknown: gRNA target site sequence
ctggtgccccttcactgtgg

SEQ ID NO: 4382 - DNA, 20 bp, Unknown
  Description of Unknown: gRNA target site sequence
tggtgccccttcactgtggc

SEQ ID NO: 4383 - DNA, 20 bp, Unknown
  Description of Unknown: gRNA target site sequence
ccttcactgtggcaggcgac

SEQ ID NO: 4384 - DNA, 20 bp, Unknown
  Description of Unknown: gRNA target site sequence
cttcactgtggcaggcgact

SEQ ID NO: 4385 - DNA, 20 bp, Unknown
  Description of Unknown: gRNA target site sequence
ttcactgtggcaggcgactg

SEQ ID NO: 4386 - DNA, 20 bp, Unknown
  Description of Unknown: gRNA target site sequence
tcactgtggcaggcgactgg

SEQ ID NO: 4387 - DNA, 20 bp, Unknown
  Description of Unknown: gRNA target site sequence
cgactgggggttccccacct

SEQ ID NO: 4388 - DNA, 20 bp, Unknown
  Description of Unknown: gRNA target site sequence
ccccacctcggcccctctcc

SEQ ID NO: 4389 - DNA, 20 bp, Unknown
  Description of Unknown: gRNA target site sequence
cccacctcggcccctctccc

SEQ ID NO: 4390 - DNA, 20 bp, Unknown
  Description of Unknown: gRNA target site sequence
ccacctcggcccctctcccg

SEQ ID NO: 4391 - DNA, 20 bp, Unknown
  Description of Unknown: gRNA target site sequence
ctctcccggggcctgctccc

SEQ ID NO: 4392 - DNA, 20 bp, Unknown
  Description of Unknown: gRNA target site sequence
gggcctgctccccggcacct

SEQ ID NO: 4393 - DNA, 20 bp, Unknown
  Description of Unknown: gRNA target site sequence
ggcctgctccccggcacctg

SEQ ID NO: 4394 - DNA, 20 bp, Unknown
  Description of Unknown: gRNA target site sequence
ctgctccccggcacctgagg

SEQ ID NO: 4395 - DNA, 20 bp, Unknown
  Description of Unknown: gRNA target site sequence
acctgaggcagcatccttgt

SEQ ID NO: 4396 - DNA, 20 bp, Unknown
  Description of Unknown: gRNA target site sequence
cctgaggcagcatccttgtc

SEQ ID NO: 4397 - DNA, 20 bp, Unknown
  Description of Unknown: gRNA target site sequence
ctgaggcagcatccttgtca

SEQ ID NO: 4398 - DNA, 20 bp, Unknown
  Description of Unknown: gRNA target site sequence
agggccgtgccttcctgcct

SEQ ID NO: 4399 - DNA, 20 bp, Unknown
  Description of Unknown: gRNA target site sequence
ctgcctcagcgccacctctt

SEQ ID NO: 4400 - DNA, 20 bp, Unknown
  Description of Unknown: gRNA target site sequence
tgcctcagcgccacctctta

SEQ ID NO: 4401 - DNA, 20 bp, Unknown
  Description of Unknown: gRNA target site sequence
tcagcgccacctcttaaggt

SEQ ID NO: 4402 - DNA, 20 bp, Unknown
  Description of Unknown: gRNA target site sequence
cacctcttaaggttggcccg

SEQ ID NO: 4403 - DNA, 20 bp, Unknown
  Description of Unknown: gRNA target site sequence
acctcttaaggttggcccgt

SEQ ID NO: 4404 - DNA, 20 bp, Unknown
  Description of Unknown: gRNA target site sequence
aggttggcccgtgggtcact

SEQ ID NO: 4405 - DNA, 20 bp, Unknown
  Description of Unknown: gRNA target site sequence
ggttggcccgtgggtcactc

SEQ ID NO: 4406 - DNA, 20 bp, Unknown
  Description of Unknown: gRNA target site sequence
cccgtgggtcactcaggact

SEQ ID NO: 4407 - DNA, 20 bp, Unknown
  Description of Unknown: gRNA target site sequence
ggtcactcaggactcagaac

SEQ ID NO: 4408 - DNA, 20 bp, Unknown
  Description of Unknown: gRNA target site sequence
tcactcaggactcagaactg

SEQ ID NO: 4409 - DNA, 20 bp, Unknown
  Description of Unknown: gRNA target site sequence
ggactcagaactggagattc

SEQ ID NO: 4410 - DNA, 20 bp, Unknown
  Description of Unknown: gRNA target site sequence
gactcagaactggagattct

SEQ ID NO: 4411 - DNA, 20 bp, Unknown
  Description of Unknown: gRNA target site sequence
gaactggagattctgggcaa

SEQ ID NO: 4412 - DNA, 20 bp, Unknown
  Description of Unknown: gRNA target site sequence
aactggagattctgggcaaa

SEQ ID NO: 4413 - DNA, 20 bp, Unknown
  Description of Unknown: gRNA target site sequence
gagattctgggcaaaaggca

SEQ ID NO: 4414 - DNA, 20 bp, Unknown
  Description of Unknown: gRNA target site sequence
gattctgggcaaaaggcaaa

SEQ ID NO: 4415 - DNA, 20 bp, Unknown
  Description of Unknown: gRNA target site sequence
tgggcaaaaggcaaagagca

SEQ ID NO: 4416 - DNA, 20 bp, Unknown
  Description of Unknown: gRNA target site sequence
gggcaaaaggcaaagagcaa

SEQ ID NO: 4417 - DNA, 20 bp, Unknown
  Description of Unknown: gRNA target site sequence
ggcaaaaggcaaagagcaaa

SEQ ID NO: 4418 - DNA, 20 bp, Unknown
  Description of Unknown: gRNA target site sequence
ggcaaagagcaaagggccaa

SEQ ID NO: 4419 - DNA, 20 bp, Unknown
  Description of Unknown: gRNA target site sequence
gcaaagagcaaagggccaaa

SEQ ID NO: 4420 - DNA, 20 bp, Unknown
  Description of Unknown: gRNA target site sequence
caaagggccaaaaggcatcc

SEQ ID NO: 4421 - DNA, 20 bp, Unknown
  Description of Unknown: gRNA target site sequence
aaagggccaaaaggcatccc

SEQ ID NO: 4422 - DNA, 20 bp, Unknown
  Description of Unknown: gRNA target site sequence
aagggccaaaaggcatccca

SEQ ID NO: 4423 - DNA, 20 bp, Unknown
  Description of Unknown: gRNA target site sequence
gggccaaaaggcatcccagg

SEQ ID NO: 4424 - DNA, 20 bp, Unknown
  Description of Unknown: gRNA target site sequence
gcatcccagggagacgactg

SEQ ID NO: 4425 - DNA, 20 bp, Unknown
  Description of Unknown: gRNA target site sequence
catcccagggagacgactgc

SEQ ID NO: 4426 - DNA, 20 bp, Unknown
  Description of Unknown: gRNA target site sequence
atcccagggagacgactgcg

SEQ ID NO: 4427 - DNA, 20 bp, Unknown
  Description of Unknown: gRNA target site sequence
tcccagggagacgactgcgg

SEQ ID NO: 4428 - DNA, 20 bp, Unknown
  Description of Unknown: gRNA target site sequence
ggagacgactgcgggggaac

SEQ ID NO: 4429 - DNA, 20 bp, Unknown
  Description of Unknown: gRNA target site sequence
agacgactgcgggggaacca

SEQ ID NO: 4430 - DNA, 20 bp, Unknown
  Description of Unknown: gRNA target site sequence
gacgactgcgggggaaccag

SEQ ID NO: 4431 - DNA, 20 bp, Unknown
  Description of Unknown: gRNA target site sequence
acgactgcgggggaaccaga

SEQ ID NO: 4432 - DNA, 20 bp, Unknown
  Description of Unknown: gRNA target site sequence
actgcgggggaaccagaggg

SEQ ID NO: 4433 - DNA, 20 bp, Unknown
  Description of Unknown: gRNA target site sequence
tgcgggggaaccagagggca

SEQ ID NO: 4434 - DNA, 20 bp, Unknown
  Description of Unknown: gRNA target site sequence
gcgggggaaccagagggcag

SEQ ID NO: 4435 - DNA, 20 bp, Unknown
  Description of Unknown: gRNA target site sequence
cgggggaaccagagggcaga

SEQ ID NO: 4436 - DNA, 20 bp, Unknown
  Description of Unknown: gRNA target site sequence
gggggaaccagagggcagag

SEQ ID NO: 4437 - DNA, 20 bp, Unknown
  Description of Unknown: gRNA target site sequence
gggcagaggggcgctcgtca

SEQ ID NO: 4438 - DNA, 20 bp, Unknown
  Description of Unknown: gRNA target site sequence
ggcagaggggcgctcgtcac

SEQ ID NO: 4439 - DNA, 20 bp, Unknown
  Description of Unknown: gRNA target site sequence
gcagaggggcgctcgtcaca

SEQ ID NO: 4440 - DNA, 20 bp, Unknown
  Description of Unknown: gRNA target site sequence
cagaggggcgctcgtcacag

SEQ ID NO: 4441 - DNA, 20 bp, Unknown
  Description of Unknown: gRNA target site sequence
gaggggcgctcgtcacaggg

SEQ ID NO: 4442 - DNA, 20 bp, Unknown
  Description of Unknown: gRNA target site sequence
aggggcgctcgtcacagggg

SEQ ID NO: 4443 - DNA, 20 bp, Unknown
  Description of Unknown: gRNA target site sequence
ggggcgctcgtcacagggga

SEQ ID NO: 4444 - DNA, 20 bp, Unknown
  Description of Unknown: gRNA target site sequence
gggcgctcgtcacaggggag

SEQ ID NO: 4445 - DNA, 20 bp, Unknown
  Description of Unknown: gRNA target site sequence
ggcgctcgtcacaggggagg

SEQ ID NO: 4446 - DNA, 20 bp, Unknown
  Description of Unknown: gRNA target site sequence
cgctcgtcacaggggagggg

SEQ ID NO: 4447 - DNA, 20 bp, Unknown
  Description of Unknown: gRNA target site sequence
gtcacaggggagggggagct

SEQ ID NO: 4448 - DNA, 20 bp, Unknown
  Description of Unknown: gRNA target site sequence
caggggagggggagctgagc

SEQ ID NO: 4449 - DNA, 20 bp, Unknown
  Description of Unknown: gRNA target site sequence
aggggagggggagctgagcg

SEQ ID NO: 4450 - DNA, 20 bp, Unknown
  Description of Unknown: gRNA target site sequence
ggagggggagctgagcgagg

SEQ ID NO: 4451 - DNA, 20 bp, Unknown
  Description of Unknown: gRNA target site sequence
gagggggagctgagcgaggc

SEQ ID NO: 4452 - DNA, 20 bp, Unknown
  Description of Unknown: gRNA target site sequence
gggggagctgagcgaggcag

SEQ ID NO: 4453 - DNA, 20 bp, Unknown
  Description of Unknown: gRNA target site sequence
ggggagctgagcgaggcagg

SEQ ID NO: 4454 - DNA, 20 bp, Unknown
  Description of Unknown: gRNA target site sequence
gggagctgagcgaggcagga

SEQ ID NO: 4455 - DNA, 20 bp, Unknown
  Description of Unknown: gRNA target site sequence
ggagctgagcgaggcaggag

SEQ ID NO: 4456 - DNA, 20 bp, Unknown
  Description of Unknown: gRNA target site sequence
agctgagcgaggcaggaggg

SEQ ID NO: 4457 - DNA, 20 bp, Unknown
  Description of Unknown: gRNA target site sequence
agcgaggcaggaggggagcc

SEQ ID NO: 4458 - DNA, 20 bp, Unknown
  Description of Unknown: gRNA target site sequence
gagcctctccccccgtgtcc

SEQ ID NO: 4459 - DNA, 20 bp, Unknown
  Description of Unknown: gRNA target site sequence
ccccccgtgtcccggctctt

SEQ ID NO: 4460 - DNA, 20 bp, Unknown
  Description of Unknown: gRNA target site sequence
cccccgtgtcccggctcttc

SEQ ID NO: 4461 - DNA, 20 bp, Unknown
  Description of Unknown: gRNA target site sequence
cggctcttcaggcacgccct

SEQ ID NO: 4462 - DNA, 20 bp, Unknown
  Description of Unknown: gRNA target site sequence
ggctcttcaggcacgccctc

SEQ ID NO: 4463 - DNA, 20 bp, Unknown
  Description of Unknown: gRNA target site sequence
ggacgccaccctccccgacc

SEQ ID NO: 4464 - DNA, 20 bp, Unknown
  Description of Unknown: gRNA target site sequence
gacgccaccctccccgaccc

SEQ ID NO: 4465 - DNA, 20 bp, Unknown
  Description of Unknown: gRNA target site sequence
gccaccctccccgacccagg

SEQ ID NO: 4466 - DNA, 20 bp, Unknown
  Description of Unknown: gRNA target site sequence
ccaccctccccgacccaggc

SEQ ID NO: 4467 - DNA, 20 bp, Unknown
  Description of Unknown: gRNA target site sequence
cctccccgacccaggcggga

SEQ ID NO: 4468 - DNA, 20 bp, Unknown
  Description of Unknown: gRNA target site sequence
ccgacccaggcgggaaagat

SEQ ID NO: 4469 - DNA, 20 bp, Unknown
  Description of Unknown: gRNA target site sequence
gacccaggcgggaaagataa

SEQ ID NO: 4470 - DNA, 20 bp, Unknown
  Description of Unknown: gRNA target site sequence
caggcgggaaagataagagc

SEQ ID NO: 4471 - DNA, 20 bp, Unknown
  Description of Unknown: gRNA target site sequence
aggcgggaaagataagagca

SEQ ID NO: 4472 - DNA, 20 bp, Unknown
  Description of Unknown: gRNA target site sequence
agataagagcaaggtgtccg

SEQ ID NO: 4473 - DNA, 20 bp, Unknown
  Description of Unknown: gRNA target site sequence
gcagcctgacactcgtgcct

SEQ ID NO: 4474 - DNA, 20 bp, Unknown
  Description of Unknown: gRNA target site sequence
cagcctgacactcgtgcctc

SEQ ID NO: 4475 - DNA, 20 bp, Unknown
  Description of Unknown: gRNA target site sequence
tcaggtgcccgcgcttgtgc

SEQ ID NO: 4476 - DNA, 20 bp, Unknown
  Description of Unknown: gRNA target site sequence
tgcccgcgcttgtgccggac

SEQ ID NO: 4477 - DNA, 20 bp, Unknown
  Description of Unknown: gRNA target site sequence
tgtgccggacaagactctca

SEQ ID NO: 4478 - DNA, 20 bp, Unknown
  Description of Unknown: gRNA target site sequence
gtgccggacaagactctcac

SEQ ID NO: 4479 - DNA, 20 bp, Unknown
  Description of Unknown: gRNA target site sequence
ccggacaagactctcacagg

SEQ ID NO: 4480 - DNA, 20 bp, Unknown
  Description of Unknown: gRNA target site sequence
ctctcacaggtggcatgcct

SEQ ID NO: 4481 - DNA, 20 bp, Unknown
  Description of Unknown: gRNA target site sequence
gcatgcctcggtttccccac

SEQ ID NO: 4482 - DNA, 20 bp, Unknown
  Description of Unknown: gRNA target site sequence
ctcggtttccccactggtaa

SEQ ID NO: 4483 - DNA, 20 bp, Unknown
  Description of Unknown: gRNA target site sequence
tttccccactggtaacagca

SEQ ID NO: 4484 - DNA, 20 bp, Unknown
  Description of Unknown: gRNA target site sequence
ttccccactggtaacagcac

SEQ ID NO: 4485 - DNA, 20 bp, Unknown
  Description of Unknown: gRNA target site sequence
tccccactggtaacagcaca

SEQ ID NO: 4486 - DNA, 20 bp, Unknown
  Description of Unknown: gRNA target site sequence
tggtaacagcacagggcact

SEQ ID NO: 4487 - DNA, 20 bp, Unknown
  Description of Unknown: gRNA target site sequence
aacagcacagggcactcagc

SEQ ID NO: 4488 - DNA, 20 bp, Unknown
  Description of Unknown: gRNA target site sequence
acagcacagggcactcagca

SEQ ID NO: 4489 - DNA, 20 bp, Unknown
  Description of Unknown: gRNA target site sequence
acagggcactcagcaaggcg

SEQ ID NO: 4490 - DNA, 20 bp, Unknown
  Description of Unknown: gRNA target site sequence
gggcactcagcaaggcgcag

SEQ ID NO: 4491 - DNA, 20 bp, Unknown
  Description of Unknown: gRNA target site sequence
ggcactcagcaaggcgcagt

SEQ ID NO: 4492 - DNA, 20 bp, Unknown
  Description of Unknown: gRNA target site sequence
caaggcgcagtgggcatgac

SEQ ID NO: 4493 - DNA, 20 bp, Unknown
  Description of Unknown: gRNA target site sequence
aaggcgcagtgggcatgact

SEQ ID NO: 4494 - DNA, 20 bp, Unknown
  Description of Unknown: gRNA target site sequence
aggcgcagtgggcatgactg

SEQ ID NO: 4495 - DNA, 20 bp, Unknown
  Description of Unknown: gRNA target site sequence
tgggcatgactggggtcctg

SEQ ID NO: 4496 - DNA, 20 bp, Unknown
  Description of Unknown: gRNA target site sequence
gggcatgactggggtcctgt

SEQ ID NO: 4497 - DNA, 20 bp, Unknown
  Description of Unknown: gRNA target site sequence
gggtcctgtgggtcctgacc

SEQ ID NO: 4498 - DNA, 20 bp, Unknown
  Description of Unknown: gRNA target site sequence
tgtgggtcctgacccagatg

SEQ ID NO: 4499 - DNA, 20 bp, Unknown
  Description of Unknown: gRNA target site sequence
tgacccagatgtggccaccc

SEQ ID NO: 4500 - DNA, 20 bp, Unknown
  Description of Unknown: gRNA target site sequence
agatgtggccaccccggccg

SEQ ID NO: 4501 - DNA, 20 bp, Unknown
  Description of Unknown: gRNA target site sequence
tgtggccaccccggccgcag

SEQ ID NO: 4502 - DNA, 20 bp, Unknown
  Description of Unknown: gRNA target site sequence
ggccgcagtggtcttcattc

SEQ ID NO: 4503 - DNA, 20 bp, Unknown
  Description of Unknown: gRNA target site sequence
gccgcagtggtcttcattcc

SEQ ID NO: 4504 - DNA, 20 bp, Unknown
  Description of Unknown: gRNA target site sequence
tattcactgcgttcgccatt

SEQ ID NO: 4505 - DNA, 20 bp, Unknown
  Description of Unknown: gRNA target site sequence
gttcgccattcggtcattcc

SEQ ID NO: 4506 - DNA, 20 bp, Unknown
  Description of Unknown: gRNA target site sequence
ttcgccattcggtcattccc

SEQ ID NO: 4507 - DNA, 20 bp, Unknown
  Description of Unknown: gRNA target site sequence
tcgccattcggtcattcccg

SEQ ID NO: 4508 - DNA, 20 bp, Unknown
  Description of Unknown: gRNA target site sequence
cggggccaccactcccacct

SEQ ID NO: 4509 - DNA, 20 bp, Unknown
  Description of Unknown: gRNA target site sequence
ggggccaccactcccacctc

SEQ ID NO: 4510 - DNA, 20 bp, Unknown
  Description of Unknown: gRNA target site sequence
gtgcttcccttgtgttttat

SEQ ID NO: 4511 - DNA, 20 bp, Unknown
  Description of Unknown: gRNA target site sequence
tttatgagatatccccaacc

SEQ ID NO: 4512 - DNA, 20 bp, Unknown
  Description of Unknown: gRNA target site sequence
tccccaacccggctgcttat

SEQ ID NO: 4513 - DNA, 20 bp, Unknown
  Description of Unknown: gRNA target site sequence
gctgcttattggccccgtcc

SEQ ID NO: 4514 - DNA, 20 bp, Unknown
  Description of Unknown: gRNA target site sequence
ctgcttattggccccgtccg

SEQ ID NO: 4515 - DNA, 20 bp, Unknown
  Description of Unknown: gRNA target site sequence
tgcttattggccccgtccga

SEQ ID NO: 4516 - DNA, 20 bp, Unknown
  Description of Unknown: gRNA target site sequence
ttattggccccgtccgaggg

SEQ ID NO: 4517 - DNA, 20 bp, Unknown
  Description of Unknown: gRNA target site sequence
tattggccccgtccgagggc

SEQ ID NO: 4518 - DNA, 20 bp, Unknown
  Description of Unknown: gRNA target site sequence
ttggccccgtccgagggcag

SEQ ID NO: 4519 - DNA, 20 bp, Unknown
  Description of Unknown: gRNA target site sequence
ccgagggcaggagcataaat

SEQ ID NO: 4520 - DNA, 20 bp, Unknown
  Description of Unknown: gRNA target site sequence
gagggcaggagcataaataa

SEQ ID NO: 4521 - DNA, 20 bp, Unknown
  Description of Unknown: gRNA target site sequence
ataaataagagcctctgctt

SEQ ID NO: 4522 - DNA, 20 bp, Unknown
  Description of Unknown: gRNA target site sequence
taagagcctctgctttggcg

SEQ ID NO: 4523 - DNA, 20 bp, Unknown
  Description of Unknown: gRNA target site sequence
aagagcctctgctttggcgt

SEQ ID NO: 4524 - DNA, 20 bp, Unknown
  Description of Unknown: gRNA target site sequence
ctttggcgtgggaccactgt

SEQ ID NO: 4525 - DNA, 20 bp, Unknown
  Description of Unknown: gRNA target site sequence
cgtgggaccactgtgagctc

SEQ ID NO: 4526 - DNA, 20 bp, Unknown
  Description of Unknown: gRNA target site sequence
ggaccactgtgagctccagt

SEQ ID NO: 4527 - DNA, 20 bp, Unknown
  Description of Unknown: gRNA target site sequence
cagtcagcgctgccactgct

SEQ ID NO: 4528 - DNA, 20 bp, Unknown
  Description of Unknown: gRNA target site sequence
gcgctgccactgctgagctc

SEQ ID NO: 4529 - DNA, 20 bp, Unknown
  Description of Unknown: gRNA target site sequence
cgctgccactgctgagctct

SEQ ID NO: 4530 - DNA, 20 bp, Unknown
  Description of Unknown: gRNA target site sequence
gctgagctctgggccttcga

SEQ ID NO: 4531 - DNA, 20 bp, Unknown
  Description of Unknown: gRNA target site sequence
ctgagctctgggccttcgac

SEQ ID NO: 4532 - DNA, 20 bp, Unknown
  Description of Unknown: gRNA target site sequence
tctgggccttcgacaggact

SEQ ID NO: 4533 - DNA, 20 bp, Unknown
  Description of Unknown: gRNA target site sequence
actgacttctccgtgtgctt

SEQ ID NO: 4534 - DNA, 20 bp, Unknown
  Description of Unknown: gRNA target site sequence
ctgacttctccgtgtgcttt

SEQ ID NO: 4535 - DNA, 20 bp, Unknown
  Description of Unknown: gRNA target site sequence
tctccgtgtgctttgggtca

SEQ ID NO: 4536 - DNA, 20 bp, Unknown
  Description of Unknown: gRNA target site sequence
ctccgtgtgctttgggtcat

SEQ ID NO: 4537 - DNA, 20 bp, Unknown
  Description of Unknown: gRNA target site sequence
gtgtgctttgggtcatgggt

SEQ ID NO: 4538 - DNA, 20 bp, Unknown
  Description of Unknown: gRNA target site sequence
tgtgctttgggtcatgggtg

SEQ ID NO: 4539 - DNA, 20 bp, Unknown
  Description of Unknown: gRNA target site sequence
tcatgggtgaggacgcctcc

SEQ ID NO: 4540 - DNA, 20 bp, Unknown
  Description of Unknown: gRNA target site sequence
gggtgaggacgcctcctggc

SEQ ID NO: 4541 - DNA, 20 bp, Unknown
  Description of Unknown: gRNA target site sequence
ggtgaggacgcctcctggca

SEQ ID NO: 4542 - DNA, 20 bp, Unknown
  Description of Unknown: gRNA target site sequence
tcctggcaaggctgcgtcct

SEQ ID NO: 4543 - DNA, 20 bp, Unknown
  Description of Unknown: gRNA target site sequence
cctggcaaggctgcgtcctg

SEQ ID NO: 4544 - DNA, 20 bp, Unknown
  Description of Unknown: gRNA target site sequence
ctgcgtcctgaggattaaat

SEQ ID NO: 4545 - DNA, 20 bp, Unknown
  Description of Unknown: gRNA target site sequence
tgcgtcctgaggattaaatc

SEQ ID NO: 4546 - DNA, 20 bp, Unknown
  Description of Unknown: gRNA target site sequence
ggtcatctgtgaaaactacc

SEQ ID NO: 4547 - DNA, 20 bp, Unknown
  Description of Unknown: gRNA target site sequence
tctgtgaaaactacccagcc

SEQ ID NO: 4548 - DNA, 20 bp, Unknown
  Description of Unknown: gRNA target site sequence
acttttttgtttgtttcttt

SEQ ID NO: 4549 - DNA, 20 bp, Unknown
  Description of Unknown: gRNA target site sequence
ttgtttgtttcttttagtga

SEQ ID NO: 4550 - DNA, 20 bp, Unknown
  Description of Unknown: gRNA target site sequence
tgtttgtttcttttagtgac

SEQ ID NO: 4551 - DNA, 20 bp, Unknown
  Description of Unknown: gRNA target site sequence
gtttgtttcttttagtgaca

SEQ ID NO: 4552 - DNA, 20 bp, Unknown
  Description of Unknown: gRNA target site sequence
cagggtcttgctctgtcacc

SEQ ID NO: 4553 - DNA, 20 bp, Unknown
  Description of Unknown: gRNA target site sequence
agggtcttgctctgtcaccc

SEQ ID NO: 4554 - DNA, 20 bp, Unknown
  Description of Unknown: gRNA target site sequence
tcttgctctgtcacccaggc

SEQ ID NO: 4555 - DNA, 20 bp, Unknown
  Description of Unknown: gRNA target site sequence
ttgctctgtcacccaggctg

SEQ ID NO: 4556 - DNA, 20 bp, Unknown
  Description of Unknown: gRNA target site sequence
ctgtcacccaggctggagtg

SEQ ID NO: 4557 - DNA, 20 bp, Unknown
  Description of Unknown: gRNA target site sequence
tcacccaggctggagtgcag

SEQ ID NO: 4558 - DNA, 20 bp, Unknown
  Description of Unknown: gRNA target site sequence
ggagtgcagtggtgtgatct

SEQ ID NO: 4559 - DNA, 20 bp, Unknown
  Description of Unknown: gRNA target site sequence
atctcggctcactcgacctc

SEQ ID NO: 4560 - DNA, 20 bp, Unknown
  Description of Unknown: gRNA target site sequence
tctcggctcactcgacctcc

SEQ ID NO: 4561 - DNA, 20 bp, Unknown
  Description of Unknown: gRNA target site sequence
ctcggctcactcgacctccg

SEQ ID NO: 4562 - DNA, 20 bp, Unknown
  Description of Unknown: gRNA target site sequence
tcactcgacctccggggctc

SEQ ID NO: 4563 - DNA, 20 bp, Unknown
  Description of Unknown: gRNA target site sequence
aattctcccacctctgcctc

SEQ ID NO: 4564 - DNA, 20 bp, Unknown
  Description of Unknown: gRNA target site sequence
ttctcccacctctgcctcca

SEQ ID NO: 4565 - DNA, 20 bp, Unknown
  Description of Unknown: gRNA target site sequence
tcccacctctgcctccagag

SEQ ID NO: 4566 - DNA, 20 bp, Unknown
  Description of Unknown: gRNA target site sequence
acctctgcctccagagtagc

SEQ ID NO: 4567 - DNA, 20 bp, Unknown
  Description of Unknown: gRNA target site sequence
cctctgcctccagagtagct

SEQ ID NO: 4568 - DNA, 20 bp, Unknown
  Description of Unknown: gRNA target site sequence
ctccagagtagctgggacta

SEQ ID NO: 4569 - DNA, 20 bp, Unknown
  Description of Unknown: gRNA target site sequence
tccagagtagctgggactat

SEQ ID NO: 4570 - DNA, 20 bp, Unknown
  Description of Unknown: gRNA target site sequence
ataggcacgtgccaccctgc

SEQ ID NO: 4571 - DNA, 20 bp, Unknown
  Description of Unknown: gRNA target site sequence
taggcacgtgccaccctgcc

SEQ ID NO: 4572 - DNA, 20 bp, Unknown
  Description of Unknown: gRNA target site sequence
ctaatttcttccattttttt

SEQ ID NO: 4573 - DNA, 20 bp, Unknown
  Description of Unknown: gRNA target site sequence
aatttcttccatttttttta

SEQ ID NO: 4574 - DNA, 20 bp, Unknown
  Description of Unknown: gRNA target site sequence
tcttccattttttttagaga

SEQ ID NO: 4575 - DNA, 20 bp, Unknown
  Description of Unknown: gRNA target site sequence
cttccattttttttagagac

SEQ ID NO: 4576 - DNA, 20 bp, Unknown
  Description of Unknown: gRNA target site sequence
ttccattttttttagagaca

SEQ ID NO: 4577 - DNA, 20 bp, Unknown
  Description of Unknown: gRNA target site sequence
cagggtctcgctatgttccc

SEQ ID NO: 4578 - DNA, 20 bp, Unknown
  Description of Unknown: gRNA target site sequence
agggtctcgctatgttcccc

SEQ ID NO: 4579 - DNA, 20 bp, Unknown
  Description of Unknown: gRNA target site sequence
tctcgctatgttccccaggc

SEQ ID NO: 4580 - DNA, 20 bp, Unknown
  Description of Unknown: gRNA target site sequence
ctcgctatgttccccaggct

SEQ ID NO: 4581 - DNA, 20 bp, Unknown
  Description of Unknown: gRNA target site sequence
ttccccaggctgggctcaaa

SEQ ID NO: 4582 - DNA, 20 bp, Unknown
  Description of Unknown: gRNA target site sequence
ctcaaatggtcctcccacct

SEQ ID NO: 4583 - DNA, 20 bp, Unknown
  Description of Unknown: gRNA target site sequence
cctcccacctcagcctcccc

SEQ ID NO: 4584 - DNA, 20 bp, Unknown
  Description of Unknown: gRNA target site sequence
acctcagcctccccaagtac

SEQ ID NO: 4585 - DNA, 20 bp, Unknown
  Description of Unknown: gRNA target site sequence
cctcagcctccccaagtact

SEQ ID NO: 4586 - DNA, 20 bp, Unknown
  Description of Unknown: gRNA target site sequence
ctccccaagtactgggatta

SEQ ID NO: 4587 - DNA, 20 bp, Unknown
  Description of Unknown: gRNA target site sequence
tccccaagtactgggattac

SEQ ID NO: 4588 - DNA, 20 bp, Unknown
  Description of Unknown: gRNA target site sequence
agtactgggattacaggcat

SEQ ID NO: 4589 - DNA, 20 bp, Unknown
  Description of Unknown: gRNA target site sequence
caggcataagccactgcatc

SEQ ID NO: 4590 - DNA, 20 bp, Unknown
  Description of Unknown: gRNA target site sequence
ctccatgacacatattttta

SEQ ID NO: 4591 - DNA, 20 bp, Unknown
  Description of Unknown: gRNA target site sequence
tttttaaagtctgattttta

SEQ ID NO: 4592 - DNA, 20 bp, Unknown
  Description of Unknown: gRNA target site sequence
tttttaaagtcaaacttttg

SEQ ID NO: 4593 - DNA, 20 bp, Unknown
  Description of Unknown: gRNA target site sequence
taaagtcaaacttttgaagt

SEQ ID NO: 4594 - DNA, 20 bp, Unknown
  Description of Unknown: gRNA target site sequence
ttttgaagtcagattttaaa

SEQ ID NO: 4595 - DNA, 20 bp, Unknown
  Description of Unknown: gRNA target site sequence
aacaatgaatatccctcacc

SEQ ID NO: 4596 - DNA, 20 bp, Unknown
  Description of Unknown: gRNA target site sequence
ctcacctagaatcaataact

SEQ ID NO: 4597 - DNA, 20 bp, Unknown
  Description of Unknown: gRNA target site sequence
gaatattgacacatttgctt

SEQ ID NO: 4598 - DNA, 20 bp, Unknown
  Description of Unknown: gRNA target site sequence
aatattgacacatttgcttt

SEQ ID NO: 4599 - DNA, 20 bp, Unknown
  Description of Unknown: gRNA target site sequence
atattgacacatttgctttg

SEQ ID NO: 4600 - DNA, 20 bp, Unknown
  Description of Unknown: gRNA target site sequence
gacacatttgctttggggac

SEQ ID NO: 4601 - DNA, 20 bp, Unknown
  Description of Unknown: gRNA target site sequence
acacatttgctttggggact

SEQ ID NO: 4602 - DNA, 20 bp, Unknown
  Description of Unknown: gRNA target site sequence
catttgctttggggactggg

SEQ ID NO: 4603 - DNA, 20 bp, Unknown
  Description of Unknown: gRNA target site sequence
tgctttggggactgggcggc

SEQ ID NO: 4604 - DNA, 20 bp, Unknown
  Description of Unknown: gRNA target site sequence
ctttggggactgggcggctg

SEQ ID NO: 4605 - DNA, 20 bp, Unknown
  Description of Unknown: gRNA target site sequence
cggctggagctgccatgaca

SEQ ID NO: 4606 - DNA, 20 bp, Unknown
  Description of Unknown: gRNA target site sequence
atgacaaagctccgccgacc

SEQ ID NO: 4607 - DNA, 20 bp, Unknown
  Description of Unknown: gRNA target site sequence
acaaagctccgccgaccgag

SEQ ID NO: 4608 - DNA, 20 bp, Unknown
  Description of Unknown: gRNA target site sequence
ccgaccgagtggcttttaaa

SEQ ID NO: 4609 - DNA, 20 bp, Unknown
  Description of Unknown: gRNA target site sequence
gaccgagtggcttttaaaca

SEQ ID NO: 4610 - DNA, 20 bp, Unknown
  Description of Unknown: gRNA target site sequence
agcctgccctctcgccgact

SEQ ID NO: 4611 - DNA, 20 bp, Unknown
  Description of Unknown: gRNA target site sequence
gcctgccctctcgccgactg

SEQ ID NO: 4612 - DNA, 20 bp, Unknown
  Description of Unknown: gRNA target site sequence
cctgccctctcgccgactga

SEQ ID NO: 4613 - DNA, 20 bp, Unknown
  Description of Unknown: gRNA target site sequence
ccctctcgccgactgagggc

SEQ ID NO: 4614 - DNA, 20 bp, Unknown
  Description of Unknown: gRNA target site sequence
ccgactgagggctggacgtg

SEQ ID NO: 4615 - DNA, 20 bp, Unknown
  Description of Unknown: gRNA target site sequence
cgactgagggctggacgtgc

SEQ ID NO: 4616 - DNA, 20 bp, Unknown
  Description of Unknown: gRNA target site sequence
tgagggctggacgtgcagga

SEQ ID NO: 4617 - DNA, 20 bp, Unknown
  Description of Unknown: gRNA target site sequence
agggctggacgtgcaggatg

SEQ ID NO: 4618 - DNA, 20 bp, Unknown
  Description of Unknown: gRNA target site sequence
acgtgcaggatggagctccg

SEQ ID NO: 4619 - DNA, 20 bp, Unknown
  Description of Unknown: gRNA target site sequence
cgtgcaggatggagctccgc

SEQ ID NO: 4620 - DNA, 20 bp, Unknown
  Description of Unknown: gRNA target site sequence
gtgcaggatggagctccgca

SEQ ID NO: 4621 - DNA, 20 bp, Unknown
  Description of Unknown: gRNA target site sequence
aggatggagctccgcagggt

SEQ ID NO: 4622 - DNA, 20 bp, Unknown
  Description of Unknown: gRNA target site sequence
ggtcggctcccctgtgctct

SEQ ID NO: 4623 - DNA, 20 bp, Unknown
  Description of Unknown: gRNA target site sequence
gtcggctcccctgtgctctg

SEQ ID NO: 4624 - DNA, 20 bp, Unknown
  Description of Unknown: gRNA target site sequence
tcggctcccctgtgctctga

SEQ ID NO: 4625 - DNA, 20 bp, Unknown
  Description of Unknown: gRNA target site sequence
cggctcccctgtgctctgag

SEQ ID NO: 4626 - DNA, 20 bp, Unknown
  Description of Unknown: gRNA target site sequence
gtgctctgaggggctctgct

SEQ ID NO: 4627 - DNA, 20 bp, Unknown
  Description of Unknown: gRNA target site sequence
gggctctgctcagcctctcc

SEQ ID NO: 4628 - DNA, 20 bp, Unknown
  Description of Unknown: gRNA target site sequence
tgctcagcctctcccggctg

SEQ ID NO: 4629 - DNA, 20 bp, Unknown
  Description of Unknown: gRNA target site sequence
tcccggctgtggcttaaaaa

SEQ ID NO: 4630 - DNA, 20 bp, Unknown
  Description of Unknown: gRNA target site sequence
ccggctgtggcttaaaaaca

SEQ ID NO: 4631 - DNA, 20 bp, Unknown
  Description of Unknown: gRNA target site sequence
cagagcctgtcctcccgccg

SEQ ID NO: 4632 - DNA, 20 bp, Unknown
  Description of Unknown: gRNA target site sequence
agagcctgtcctcccgccgt

SEQ ID NO: 4633 - DNA, 20 bp, Unknown
  Description of Unknown: gRNA target site sequence
gagcctgtcctcccgccgtg

SEQ ID NO: 4634 - DNA, 20 bp, Unknown
  Description of Unknown: gRNA target site sequence
agcctgtcctcccgccgtgg

SEQ ID NO: 4635 - DNA, 20 bp, Unknown
  Description of Unknown: gRNA target site sequence
gcctgtcctcccgccgtggg

SEQ ID NO: 4636 - DNA, 20 bp, Unknown
  Description of Unknown: gRNA target site sequence
gtcctcccgccgtggggggc

SEQ ID NO: 4637 - DNA, 20 bp, Unknown
  Description of Unknown: gRNA target site sequence
gccgtggggggctggacatg

SEQ ID NO: 4638 - DNA, 20 bp, Unknown
  Description of Unknown: gRNA target site sequence
ccgtggggggctggacatgc

SEQ ID NO: 4639 - DNA, 20 bp, Unknown
  Description of Unknown: gRNA target site sequence
ggggctggacatgcaggacc

SEQ ID NO: 4640 - DNA, 20 bp, Unknown
  Description of Unknown: gRNA target site sequence
gggctggacatgcaggaccg

SEQ ID NO: 4641 - DNA, 20 bp, Unknown
  Description of Unknown: gRNA target site sequence
ggctggacatgcaggaccga

SEQ ID NO: 4642 - DNA, 20 bp, Unknown
  Description of Unknown: gRNA target site sequence
gctggacatgcaggaccgag

SEQ ID NO: 4643 - DNA, 20 bp, Unknown
  Description of Unknown: gRNA target site sequence
catgcaggaccgaggggcca

SEQ ID NO: 4644 - DNA, 20 bp, Unknown
  Description of Unknown: gRNA target site sequence
atgcaggaccgaggggccac

SEQ ID NO: 4645 - DNA, 20 bp, Unknown
  Description of Unknown: gRNA target site sequence
tgcaggaccgaggggccaca

SEQ ID NO: 4646 - DNA, 20 bp, Unknown
  Description of Unknown: gRNA target site sequence
ggaccgaggggccacagggt

SEQ ID NO: 4647 - DNA, 20 bp, Unknown
  Description of Unknown: gRNA target site sequence
gggtcggctccctgtgctcc

SEQ ID NO: 4648 - DNA, 20 bp, Unknown
  Description of Unknown: gRNA target site sequence
gtcggctccctgtgctccga

SEQ ID NO: 4649 - DNA, 20 bp, Unknown
  Description of Unknown: gRNA target site sequence
tcggctccctgtgctccgag

SEQ ID NO: 4650 - DNA, 20 bp, Unknown
  Description of Unknown: gRNA target site sequence
cggctccctgtgctccgaga

SEQ ID NO: 4651 - DNA, 20 bp, Unknown
  Description of Unknown: gRNA target site sequence
tgctccgagagggctctgct

SEQ ID NO: 4652 - DNA, 20 bp, Unknown
  Description of Unknown: gRNA target site sequence
gggctctgctcagcttctcc

SEQ ID NO: 4653 - DNA, 20 bp, Unknown
  Description of Unknown: gRNA target site sequence
tctgctcagcttctcctggc

SEQ ID NO: 4654 - DNA, 20 bp, Unknown
  Description of Unknown: gRNA target site sequence
ctgctcagcttctcctggct

SEQ ID NO: 4655 - DNA, 20 bp, Unknown
  Description of Unknown: gRNA target site sequence
tgctcagcttctcctggctg

SEQ ID NO: 4656 - DNA, 20 bp, Unknown
  Description of Unknown: gRNA target site sequence
gctcagcttctcctggctgg

SEQ ID NO: 4657 - DNA, 20 bp, Unknown
  Description of Unknown: gRNA target site sequence
ctcagcttctcctggctggg

SEQ ID NO: 4658 - DNA, 20 bp, Unknown
  Description of Unknown: gRNA target site sequence
ctcctggctggggggttttg

SEQ ID NO: 4659 - DNA, 20 bp, Unknown
  Description of Unknown: gRNA target site sequence
gtggccaccctctgtgttcc

SEQ ID NO: 4660 - DNA, 20 bp, Unknown
  Description of Unknown: gRNA target site sequence
tggccaccctctgtgttcct

SEQ ID NO: 4661 - DNA, 20 bp, Unknown
  Description of Unknown: gRNA target site sequence
accctctgtgttcctgggtt

SEQ ID NO: 4662 - DNA, 20 bp, Unknown
  Description of Unknown: gRNA target site sequence
ctctgtgttcctgggttcag

SEQ ID NO: 4663 - DNA, 20 bp, Unknown
  Description of Unknown: gRNA target site sequence
ctgggttcagaagcatcccc

SEQ ID NO: 4664 - DNA, 20 bp, Unknown
  Description of Unknown: gRNA target site sequence
tgggttcagaagcatccccc

SEQ ID NO: 4665 - DNA, 20 bp, Unknown
  Description of Unknown: gRNA target site sequence
gctctgccttcatctctgca

SEQ ID NO: 4666 - DNA, 20 bp, Unknown
  Description of Unknown: gRNA target site sequence
ctctgccttcatctctgcac

SEQ ID NO: 4667 - DNA, 20 bp, Unknown
  Description of Unknown: gRNA target site sequence
tctgcacgggtgactctgta

SEQ ID NO: 4668 - DNA, 20 bp, Unknown
  Description of Unknown: gRNA target site sequence
ctgcacgggtgactctgtac

SEQ ID NO: 4669 - DNA, 20 bp, Unknown
  Description of Unknown: gRNA target site sequence
cacgggtgactctgtacagg

SEQ ID NO: 4670 - DNA, 20 bp, Unknown
  Description of Unknown: gRNA target site sequence
ggtgactctgtacaggaagc

SEQ ID NO: 4671 - DNA, 20 bp, Unknown
  Description of Unknown: gRNA target site sequence
gtgactctgtacaggaagcc

SEQ ID NO: 4672 - DNA, 20 bp, Unknown
  Description of Unknown: gRNA target site sequence
gtacaggaagccaggcctgc

SEQ ID NO: 4673 - DNA, 20 bp, Unknown
  Description of Unknown: gRNA target site sequence
aagccaggcctgctggtcaa

SEQ ID NO: 4674 - DNA, 20 bp, Unknown
  Description of Unknown: gRNA target site sequence
cctgctggtcaatggccacc

SEQ ID NO: 4675 - DNA, 20 bp, Unknown
  Description of Unknown: gRNA target site sequence
ccctgtgccctcatcttacc

SEQ ID NO: 4676 - DNA, 20 bp, Unknown
  Description of Unknown: gRNA target site sequence
gccctcatcttacctagtcc

SEQ ID NO: 4677 - DNA, 20 bp, Unknown
  Description of Unknown: gRNA target site sequence
gccgtcaccctattcctaat

SEQ ID NO: 4678 - DNA, 20 bp, Unknown
  Description of Unknown: gRNA target site sequence
ccgtcaccctattcctaata

SEQ ID NO: 4679 - DNA, 20 bp, Unknown
  Description of Unknown: gRNA target site sequence
tcctaataaggccgccttct

SEQ ID NO: 4680 - DNA, 20 bp, Unknown
  Description of Unknown: gRNA target site sequence
cctaataaggccgccttctg

SEQ ID NO: 4681 - DNA, 20 bp, Unknown
  Description of Unknown: gRNA target site sequence
aaggccgccttctgaggtca

SEQ ID NO: 4682 - DNA, 20 bp, Unknown
  Description of Unknown: gRNA target site sequence
aggccgccttctgaggtcat

SEQ ID NO: 4683 - DNA, 20 bp, Unknown
  Description of Unknown: gRNA target site sequence
ggccgccttctgaggtcatg

SEQ ID NO: 4684 - DNA, 20 bp, Unknown
  Description of Unknown: gRNA target site sequence
gccttctgaggtcatggggt

SEQ ID NO: 4685 - DNA, 20 bp, Unknown
  Description of Unknown: gRNA target site sequence
ccttctgaggtcatggggtt

SEQ ID NO: 4686 - DNA, 20 bp, Unknown
  Description of Unknown: gRNA target site sequence
atggggttaggacttccaca

SEQ ID NO: 4687 - DNA, 20 bp, Unknown
  Description of Unknown: gRNA target site sequence
tggggttaggacttccacat

SEQ ID NO: 4688 - DNA, 20 bp, Unknown
  Description of Unknown: gRNA target site sequence
gacttccacataggaatctg

SEQ ID NO: 4689 - DNA, 20 bp, Unknown
  Description of Unknown: gRNA target site sequence
acttccacataggaatctgt

SEQ ID NO: 4690 - DNA, 20 bp, Unknown
  Description of Unknown: gRNA target site sequence
cttccacataggaatctgtg

SEQ ID NO: 4691 - DNA, 20 bp, Unknown
  Description of Unknown: gRNA target site sequence
cataggaatctgtggggaca

SEQ ID NO: 4692 - DNA, 20 bp, Unknown
  Description of Unknown: gRNA target site sequence
gaatctgtggggacacggtt

SEQ ID NO: 4693 - DNA, 20 bp, Unknown
  Description of Unknown: gRNA target site sequence
tggggacacggttcggccca

SEQ ID NO: 4694 - DNA, 20 bp, Unknown
  Description of Unknown: gRNA target site sequence
ccacacacacacacgactgt

SEQ ID NO: 4695 - DNA, 20 bp, Unknown
  Description of Unknown: gRNA target site sequence
cacacacacacacgactgtg

SEQ ID NO: 4696 - DNA, 20 bp, Unknown
  Description of Unknown: gRNA target site sequence
cacacacacacgactgtgag

SEQ ID NO: 4697 - DNA, 20 bp, Unknown
  Description of Unknown: gRNA target site sequence
cacacacgactgtgaggagt

SEQ ID NO: 4698 - DNA, 20 bp, Unknown
  Description of Unknown: gRNA target site sequence
acacgactgtgaggagttgg

SEQ ID NO: 4699 - DNA, 20 bp, Unknown
  Description of Unknown: gRNA target site sequence
acctcactcctcacccctgc

SEQ ID NO: 4700 - DNA, 20 bp, Unknown
  Description of Unknown: gRNA target site sequence
cctcactcctcacccctgcc

SEQ ID NO: 4701 - DNA, 20 bp, Unknown
  Description of Unknown: gRNA target site sequence
ctcacccctgccaggtcctc

SEQ ID NO: 4702 - DNA, 20 bp, Unknown
  Description of Unknown: gRNA target site sequence
tcacccctgccaggtcctct

SEQ ID NO: 4703 - DNA, 20 bp, Unknown
  Description of Unknown: gRNA target site sequence
cacccctgccaggtcctcta

SEQ ID NO: 4704 - DNA, 20 bp, Unknown
  Description of Unknown: gRNA target site sequence
ctgccaggtcctctagggac

SEQ ID NO: 4705 - DNA, 20 bp, Unknown
  Description of Unknown: gRNA target site sequence
caagctcgctgtcctcatcc

SEQ ID NO: 4706 - DNA, 20 bp, Unknown
  Description of Unknown: gRNA target site sequence
tcgctgtcctcatcccagca

SEQ ID NO: 4707 - DNA, 20 bp, Unknown
  Description of Unknown: gRNA target site sequence
cctcatcccagcacagcccg

SEQ ID NO: 4708 - DNA, 20 bp, Unknown
  Description of Unknown: gRNA target site sequence
ctcatcccagcacagcccgt

SEQ ID NO: 4709 - DNA, 20 bp, Unknown
  Description of Unknown: gRNA target site sequence
tcccagcacagcccgtggga

SEQ ID NO: 4710 - DNA, 20 bp, Unknown
  Description of Unknown: gRNA target site sequence
gacggtttccttgtccctaa

SEQ ID NO: 4711 - DNA, 20 bp, Unknown
  Description of Unknown: gRNA target site sequence
acggtttccttgtccctaat

SEQ ID NO: 4712 - DNA, 20 bp, Unknown
  Description of Unknown: gRNA target site sequence
ccttgtccctaatgggacca

SEQ ID NO: 4713 - DNA, 20 bp, Unknown
  Description of Unknown: gRNA target site sequence
gtccctaatgggaccacggt

SEQ ID NO: 4714 - DNA, 20 bp, Unknown
  Description of Unknown: gRNA target site sequence
ccctaatgggaccacggtca

SEQ ID NO: 4715 - DNA, 20 bp, Unknown
  Description of Unknown: gRNA target site sequence
gggaccacggtcagagatgc

SEQ ID NO: 4716 - DNA, 20 bp, Unknown
  Description of Unknown: gRNA target site sequence
ggaccacggtcagagatgcc

SEQ ID NO: 4717 - DNA, 20 bp, Unknown
  Description of Unknown: gRNA target site sequence
acggtcagagatgccgggtc

SEQ ID NO: 4718 - DNA, 20 bp, Unknown
  Description of Unknown: gRNA target site sequence
cagagatgccgggtctggtc

SEQ ID NO: 4719 - DNA, 20 bp, Unknown
  Description of Unknown: gRNA target site sequence
agagatgccgggtctggtct

SEQ ID NO: 4720 - DNA, 20 bp, Unknown
  Description of Unknown: gRNA target site sequence
atgccgggtctggtctgggc

SEQ ID NO: 4721 - DNA, 20 bp, Unknown
  Description of Unknown: gRNA target site sequence
ccgggtctggtctgggccag

SEQ ID NO: 4722 - DNA, 20 bp, Unknown
  Description of Unknown: gRNA target site sequence
cgggtctggtctgggccagc

SEQ ID NO: 4723 - DNA, 20 bp, Unknown
  Description of Unknown: gRNA target site sequence
ggccagcaggttcctccgcc

SEQ ID NO: 4724 - DNA, 20 bp, Unknown
  Description of Unknown: gRNA target site sequence
gccagcaggttcctccgccc

SEQ ID NO: 4725 - DNA, 20 bp, Unknown
  Description of Unknown: gRNA target site sequence
ccagcaggttcctccgcccg

SEQ ID NO: 4726 - DNA, 20 bp, Unknown
  Description of Unknown: gRNA target site sequence
gcaggttcctccgcccgggg

SEQ ID NO: 4727 - DNA, 20 bp, Unknown
  Description of Unknown: gRNA target site sequence
caggttcctccgcccggggc

SEQ ID NO: 4728 - DNA, 20 bp, Unknown
  Description of Unknown: gRNA target site sequence
gttcctccgcccggggcagg

SEQ ID NO: 4729 - DNA, 20 bp, Unknown
  Description of Unknown: gRNA target site sequence
agccttcttctgtgcgcttc

SEQ ID NO: 4730 - DNA, 20 bp, Unknown
  Description of Unknown: gRNA target site sequence
ttcttctgtgcgcttctgga

SEQ ID NO: 4731 - DNA, 20 bp, Unknown
  Description of Unknown: gRNA target site sequence
gaaagcaatgtcctgtaatg

SEQ ID NO: 4732 - DNA, 20 bp, Unknown
  Description of Unknown: gRNA target site sequence
cctgtaatgcggtctctctg

SEQ ID NO: 4733 - DNA, 20 bp, Unknown
  Description of Unknown: gRNA target site sequence
ctgtaatgcggtctctctgc

SEQ ID NO: 4734 - DNA, 20 bp, Unknown
  Description of Unknown: gRNA target site sequence
gtaatgcggtctctctgcgg

SEQ ID NO: 4735 - DNA, 20 bp, Unknown
  Description of Unknown: gRNA target site sequence
gcacccccaccgccacctca

SEQ ID NO: 4736 - DNA, 20 bp, Unknown
  Description of Unknown: gRNA target site sequence
cacccccaccgccacctcac

SEQ ID NO: 4737 - DNA, 20 bp, Unknown
  Description of Unknown: gRNA target site sequence
cacctcacaggcctgttcca

SEQ ID NO: 4738 - DNA, 20 bp, Unknown
  Description of Unknown: gRNA target site sequence
acaggcctgttccacagccc

SEQ ID NO: 4739 - DNA, 20 bp, Unknown
  Description of Unknown: gRNA target site sequence
caggcctgttccacagcccc

SEQ ID NO: 4740 - DNA, 20 bp, Unknown
  Description of Unknown: gRNA target site sequence
cctgttccacagccccggga

SEQ ID NO: 4741 - DNA, 20 bp, Unknown
  Description of Unknown: gRNA target site sequence
ctgttccacagccccgggat

SEQ ID NO: 4742 - DNA, 20 bp, Unknown
  Description of Unknown: gRNA target site sequence
gtctccctcctgaccctgca

SEQ ID NO: 4743 - DNA, 20 bp, Unknown
  Description of Unknown: gRNA target site sequence
tctccctcctgaccctgcat

SEQ ID NO: 4744 - DNA, 20 bp, Unknown
  Description of Unknown: gRNA target site sequence
ctccctcctgaccctgcata

SEQ ID NO: 4745 - DNA, 20 bp, Unknown
  Description of Unknown: gRNA target site sequence
tcctgaccctgcatagggca

SEQ ID NO: 4746 - DNA, 20 bp, Unknown
  Description of Unknown: gRNA target site sequence
catcaacccacgatcctacg

SEQ ID NO: 4747 - DNA, 20 bp, Unknown
  Description of Unknown: gRNA target site sequence
ccacgatcctacgtggatcc

SEQ ID NO: 4748 - DNA, 20 bp, Unknown
  Description of Unknown: gRNA target site sequence
acgatcctacgtggatccga

SEQ ID NO: 4749 - DNA, 20 bp, Unknown
  Description of Unknown: gRNA target site sequence
cgatcctacgtggatccgag

SEQ ID NO: 4750 - DNA, 20 bp, Unknown
  Description of Unknown: gRNA target site sequence
gatcctacgtggatccgaga

SEQ ID NO: 4751 - DNA, 20 bp, Unknown
  Description of Unknown: gRNA target site sequence
tcctacgtggatccgagagg

SEQ ID NO: 4752 - DNA, 20 bp, Unknown
  Description of Unknown: gRNA target site sequence
tggatccgagagggagcacc

SEQ ID NO: 4753 - DNA, 20 bp, Unknown
  Description of Unknown: gRNA target site sequence
ggatccgagagggagcacct

SEQ ID NO: 4754 - DNA, 20 bp, Unknown
  Description of Unknown: gRNA target site sequence
gatccgagagggagcacctg

SEQ ID NO: 4755 - DNA, 20 bp, Unknown
  Description of Unknown: gRNA target site sequence
gggagcacctggggaaacaa

SEQ ID NO: 4756 - DNA, 20 bp, Unknown
  Description of Unknown: gRNA target site sequence
ggggaaacaatggaatccca

SEQ ID NO: 4757 - DNA, 20 bp, Unknown
  Description of Unknown: gRNA target site sequence
accccaaatctaacttgatc

SEQ ID NO: 4758 - DNA, 20 bp, Unknown
  Description of Unknown: gRNA target site sequence
ccccaaatctaacttgatcc

SEQ ID NO: 4759 - DNA, 20 bp, Unknown
  Description of Unknown: gRNA target site sequence
aatctaacttgatccaggac

SEQ ID NO: 4760 - DNA, 20 bp, Unknown
  Description of Unknown: gRNA target site sequence
taacttgatccaggaccagc

SEQ ID NO: 4761 - DNA, 20 bp, Unknown
  Description of Unknown: gRNA target site sequence
cttgatccaggaccagccag

SEQ ID NO: 4762 - DNA, 20 bp, Unknown
  Description of Unknown: gRNA target site sequence
cttctgaatattcaccttcc

SEQ ID NO: 4763 - DNA, 20 bp, Unknown
  Description of Unknown: gRNA target site sequence
ctgaatattcaccttcctag

SEQ ID NO: 4764 - DNA, 20 bp, Unknown
  Description of Unknown: gRNA target site sequence
accttcctagtagacactac

SEQ ID NO: 4765 - DNA, 20 bp, Unknown
  Description of Unknown: gRNA target site sequence
cctagtagacactaccagcc

SEQ ID NO: 4766 - DNA, 20 bp, Unknown
  Description of Unknown: gRNA target site sequence
ctagtagacactaccagcca

SEQ ID NO: 4767 - DNA, 20 bp, Unknown
  Description of Unknown: gRNA target site sequence
tagtagacactaccagccaa

SEQ ID NO: 4768 - DNA, 20 bp, Unknown
  Description of Unknown: gRNA target site sequence
gtagacactaccagccaagg

SEQ ID NO: 4769 - DNA, 20 bp, Unknown
  Description of Unknown: gRNA target site sequence
tagacactaccagccaaggg

SEQ ID NO: 4770 - DNA, 20 bp, Unknown
  Description of Unknown: gRNA target site sequence
cactaccagccaagggaggc

SEQ ID NO: 4771 - DNA, 20 bp, Unknown
  Description of Unknown: gRNA target site sequence
actaccagccaagggaggcc

SEQ ID NO: 4772 - DNA, 20 bp, Unknown
  Description of Unknown: gRNA target site sequence
accagccaagggaggccagg

SEQ ID NO: 4773 - DNA, 20 bp, Unknown
  Description of Unknown: gRNA target site sequence
gggaggccaggaagccttcc

SEQ ID NO: 4774 - DNA, 20 bp, Unknown
  Description of Unknown: gRNA target site sequence
gaggccaggaagccttcctg

SEQ ID NO: 4775 - DNA, 20 bp, Unknown
  Description of Unknown: gRNA target site sequence
aggccaggaagccttcctgg

SEQ ID NO: 4776 - DNA, 20 bp, Unknown
  Description of Unknown: gRNA target site sequence
gccaggaagccttcctggag

SEQ ID NO: 4777 - DNA, 20 bp, Unknown
  Description of Unknown: gRNA target site sequence
ccaggaagccttcctggagg

SEQ ID NO: 4778 - DNA, 20 bp, Unknown
  Description of Unknown: gRNA target site sequence
ggaagccttcctggaggagg

SEQ ID NO: 4779 - DNA, 20 bp, Unknown
  Description of Unknown: gRNA target site sequence
cttcctggaggaggtggcct

SEQ ID NO: 4780 - DNA, 20 bp, Unknown
  Description of Unknown: gRNA target site sequence
ttcctggaggaggtggcctg

SEQ ID NO: 4781 - DNA, 20 bp, Unknown
  Description of Unknown: gRNA target site sequence
ggaggaggtggcctgaggac

SEQ ID NO: 4782 - DNA, 20 bp, Unknown
  Description of Unknown: gRNA target site sequence
gaggaggtggcctgaggact

SEQ ID NO: 4783 - DNA, 20 bp, Unknown
  Description of Unknown: gRNA target site sequence
aggaggtggcctgaggactg

SEQ ID NO: 4784 - DNA, 20 bp, Unknown
  Description of Unknown: gRNA target site sequence
ggtggcctgaggactggggt

SEQ ID NO: 4785 - DNA, 20 bp, Unknown
  Description of Unknown: gRNA target site sequence
gtggcctgaggactggggtg

SEQ ID NO: 4786 - DNA, 20 bp, Unknown
  Description of Unknown: gRNA target site sequence
gcctgaggactggggtgagg

SEQ ID NO: 4787 - DNA, 20 bp, Unknown
  Description of Unknown: gRNA target site sequence
cctgaggactggggtgaggc

SEQ ID NO: 4788 - DNA, 20 bp, Unknown
  Description of Unknown: gRNA target site sequence
ggggtgaggcaggccctgcg

SEQ ID NO: 4789 - DNA, 20 bp, Unknown
  Description of Unknown: gRNA target site sequence
gggtgaggcaggccctgcgt

SEQ ID NO: 4790 - DNA, 20 bp, Unknown
  Description of Unknown: gRNA target site sequence
ggtgaggcaggccctgcgtg

SEQ ID NO: 4791 - DNA, 20 bp, Unknown
  Description of Unknown: gRNA target site sequence
gtgaggcaggccctgcgtgg

SEQ ID NO: 4792 - DNA, 20 bp, Unknown
  Description of Unknown: gRNA target site sequence
cctgcgtgggggtcgccacc

SEQ ID NO: 4793 - DNA, 20 bp, Unknown
  Description of Unknown: gRNA target site sequence
gccacccagcacccccacac

SEQ ID NO: 4794 - DNA, 20 bp, Unknown
  Description of Unknown: gRNA target site sequence
ccacccagcacccccacact

SEQ ID NO: 4795 - DNA, 20 bp, Unknown
  Description of Unknown: gRNA target site sequence
cccagcacccccacactggg

SEQ ID NO: 4796 - DNA, 20 bp, Unknown
  Description of Unknown: gRNA target site sequence
ccagcacccccacactgggt

SEQ ID NO: 4797 - DNA, 20 bp, Unknown
  Description of Unknown: gRNA target site sequence
agcacccccacactgggtgg

SEQ ID NO: 4798 - DNA, 20 bp, Unknown
  Description of Unknown: gRNA target site sequence
cccccacactgggtgggagc

SEQ ID NO: 4799 - DNA, 20 bp, Unknown
  Description of Unknown: gRNA target site sequence
ctgggtgggagccagtctct

SEQ ID NO: 4800 - DNA, 20 bp, Unknown
  Description of Unknown: gRNA target site sequence
tgggagccagtctctgagac

SEQ ID NO: 4801 - DNA, 20 bp, Unknown
  Description of Unknown: gRNA target site sequence
agccagtctctgagactggc

SEQ ID NO: 4802 - DNA, 20 bp, Unknown
  Description of Unknown: gRNA target site sequence
gccagtctctgagactggct

SEQ ID NO: 4803 - DNA, 20 bp, Unknown
  Description of Unknown: gRNA target site sequence
ccagtctctgagactggctg

SEQ ID NO: 4804 - DNA, 20 bp, Unknown
  Description of Unknown: gRNA target site sequence
cagtctctgagactggctgg

SEQ ID NO: 4805 - DNA, 20 bp, Unknown
  Description of Unknown: gRNA target site sequence
gtctctgagactggctgggg

SEQ ID NO: 4806 - DNA, 20 bp, Unknown
  Description of Unknown: gRNA target site sequence
tctctgagactggctggggg

SEQ ID NO: 4807 - DNA, 20 bp, Unknown
  Description of Unknown: gRNA target site sequence
ctgagactggctgggggagg

SEQ ID NO: 4808 - DNA, 20 bp, Unknown
  Description of Unknown: gRNA target site sequence
tgagactggctgggggaggt

SEQ ID NO: 4809 - DNA, 20 bp, Unknown
  Description of Unknown: gRNA target site sequence
agactggctgggggaggtgg

SEQ ID NO: 4810 - DNA, 20 bp, Unknown
  Description of Unknown: gRNA target site sequence
actggctgggggaggtggga

SEQ ID NO: 4811 - DNA, 20 bp, Unknown
  Description of Unknown: gRNA target site sequence
ctggctgggggaggtgggag

SEQ ID NO: 4812 - DNA, 20 bp, Unknown
  Description of Unknown: gRNA target site sequence
tggctgggggaggtgggaga

SEQ ID NO: 4813 - DNA, 20 bp, Unknown
  Description of Unknown: gRNA target site sequence
ggctgggggaggtgggagag

SEQ ID NO: 4814 - DNA, 20 bp, Unknown
  Description of Unknown: gRNA target site sequence
gctgggggaggtgggagagg

SEQ ID NO: 4815 - DNA, 20 bp, Unknown
  Description of Unknown: gRNA target site sequence
agagggggctgcttgaactg

SEQ ID NO: 4816 - DNA, 20 bp, Unknown
  Description of Unknown: gRNA target site sequence
ctgcttgaactgcagacacc

SEQ ID NO: 4817 - DNA, 20 bp, Unknown
  Description of Unknown: gRNA target site sequence
tgcttgaactgcagacaccg

SEQ ID NO: 4818 - DNA, 20 bp, Unknown
  Description of Unknown: gRNA target site sequence
gaactgcagacaccgaggtc

SEQ ID NO: 4819 - DNA, 20 bp, Unknown
  Description of Unknown: gRNA target site sequence
ggtctagcccccaccccacc

SEQ ID NO: 4820 - DNA, 20 bp, Unknown
  Description of Unknown: gRNA target site sequence
tagcccccaccccacccagc

SEQ ID NO: 4821 - DNA, 20 bp, Unknown
  Description of Unknown: gRNA target site sequence
ccccaccccacccagccagt

SEQ ID NO: 4822 - DNA, 20 bp, Unknown
  Description of Unknown: gRNA target site sequence
caccccacccagccagttgg

SEQ ID NO: 4823 - DNA, 20 bp, Unknown
  Description of Unknown: gRNA target site sequence
ccccacccagccagttggtg

SEQ ID NO: 4824 - DNA, 20 bp, Unknown
  Description of Unknown: gRNA target site sequence
cccacccagccagttggtgg

SEQ ID NO: 4825 - DNA, 20 bp, Unknown
  Description of Unknown: gRNA target site sequence
acccagccagttggtggagg

SEQ ID NO: 4826 - DNA, 20 bp, Unknown
  Description of Unknown: gRNA target site sequence
cccagccagttggtggaggc

SEQ ID NO: 4827 - DNA, 20 bp, Unknown
  Description of Unknown: gRNA target site sequence
ccagccagttggtggaggca

SEQ ID NO: 4828 - DNA, 20 bp, Unknown
  Description of Unknown: gRNA target site sequence
cagccagttggtggaggcag

SEQ ID NO: 4829 - DNA, 20 bp, Unknown
  Description of Unknown: gRNA target site sequence
gccagttggtggaggcaggg

SEQ ID NO: 4830 - DNA, 20 bp, Unknown
  Description of Unknown: gRNA target site sequence
ccagttggtggaggcagggg

SEQ ID NO: 4831 - DNA, 20 bp, Unknown
  Description of Unknown: gRNA target site sequence
tggtggaggcaggggaggcc

SEQ ID NO: 4832 - DNA, 20 bp, Unknown
  Description of Unknown: gRNA target site sequence
ggtggaggcaggggaggccg

SEQ ID NO: 4833 - DNA, 20 bp, Unknown
  Description of Unknown: gRNA target site sequence
gtggaggcaggggaggccga

SEQ ID NO: 4834 - DNA, 20 bp, Unknown
  Description of Unknown: gRNA target site sequence
tggaggcaggggaggccgag

SEQ ID NO: 4835 - DNA, 20 bp, Unknown
  Description of Unknown: gRNA target site sequence
gcaggggaggccgaggggcc

SEQ ID NO: 4836 - DNA, 20 bp, Unknown
  Description of Unknown: gRNA target site sequence
gggaggccgaggggcccagc

SEQ ID NO: 4837 - DNA, 20 bp, Unknown
  Description of Unknown: gRNA target site sequence
gcccagctggacctgctccc

SEQ ID NO: 4838 - DNA, 20 bp, Unknown
  Description of Unknown: gRNA target site sequence
cccagctggacctgctcccc

SEQ ID NO: 4839 - DNA, 20 bp, Unknown
  Description of Unknown: gRNA target site sequence
ccagctggacctgctccccg

SEQ ID NO: 4840 - DNA, 20 bp, Unknown
  Description of Unknown: gRNA target site sequence
gctggacctgctccccgggg

SEQ ID NO: 4841 - DNA, 20 bp, Unknown
  Description of Unknown: gRNA target site sequence
ccccggggtggattccaaaa

SEQ ID NO: 4842 - DNA, 20 bp, Unknown
  Description of Unknown: gRNA target site sequence
cccggggtggattccaaaat

SEQ ID NO: 4843 - DNA, 20 bp, Unknown
  Description of Unknown: gRNA target site sequence
ccggggtggattccaaaata

SEQ ID NO: 4844 - DNA, 20 bp, Unknown
  Description of Unknown: gRNA target site sequence
cggggtggattccaaaatag

SEQ ID NO: 4845 - DNA, 20 bp, Unknown
  Description of Unknown: gRNA target site sequence
ggggtggattccaaaatagg

SEQ ID NO: 4846 - DNA, 20 bp, Unknown
  Description of Unknown: gRNA target site sequence
gggtggattccaaaataggg

SEQ ID NO: 4847 - DNA, 20 bp, Unknown
  Description of Unknown: gRNA target site sequence
ggattccaaaataggggggt

SEQ ID NO: 4848 - DNA, 20 bp, Unknown
  Description of Unknown: gRNA target site sequence
gattccaaaataggggggtt

SEQ ID NO: 4849 - DNA, 20 bp, Unknown
  Description of Unknown: gRNA target site sequence
attccaaaataggggggttg

SEQ ID NO: 4850 - DNA, 20 bp, Unknown
  Description of Unknown: gRNA target site sequence
ttccaaaataggggggttgg

SEQ ID NO: 4851 - DNA, 20 bp, Unknown
  Description of Unknown: gRNA target site sequence
tccaaaataggggggttggg

SEQ ID NO: 4852 - DNA, 20 bp, Unknown
  Description of Unknown: gRNA target site sequence
ccaaaataggggggttgggg

SEQ ID NO: 4853 - DNA, 20 bp, Unknown
  Description of Unknown: gRNA target site sequence
caaaataggggggttggggg

SEQ ID NO: 4854 - DNA, 20 bp, Unknown
  Description of Unknown: gRNA target site sequence
aataggggggttgggggggg

SEQ ID NO: 4855 - DNA, 20 bp, Unknown
  Description of Unknown: gRNA target site sequence
gggggttggggggggcggaa

SEQ ID NO: 4856 - DNA, 20 bp, Unknown
  Description of Unknown: gRNA target site sequence
ggggttggggggggcggaac

SEQ ID NO: 4857 - DNA, 20 bp, Unknown
  Description of Unknown: gRNA target site sequence
ggttggggggggcggaacag

SEQ ID NO: 4858 - DNA, 20 bp, Unknown
  Description of Unknown: gRNA target site sequence
gggggggcggaacaggagcc

SEQ ID NO: 4859 - DNA, 20 bp, Unknown
  Description of Unknown: gRNA target site sequence
ggggggcggaacaggagccc

SEQ ID NO: 4860 - DNA, 20 bp, Unknown
  Description of Unknown: gRNA target site sequence
gggggcggaacaggagccca

SEQ ID NO: 4861 - DNA, 20 bp, Unknown
  Description of Unknown: gRNA target site sequence
ggaacaggagcccagggtcc

SEQ ID NO: 4862 - DNA, 20 bp, Unknown
  Description of Unknown: gRNA target site sequence
ggagcccagggtcctggctt

SEQ ID NO: 4863 - DNA, 20 bp, Unknown
  Description of Unknown: gRNA target site sequence
gagcccagggtcctggcttg

SEQ ID NO: 4864 - DNA, 20 bp, Unknown
  Description of Unknown: gRNA target site sequence
cagggtcctggcttgaggcc

SEQ ID NO: 4865 - DNA, 20 bp, Unknown
  Description of Unknown: gRNA target site sequence
ggtcctggcttgaggcccag

SEQ ID NO: 4866 - DNA, 20 bp, Unknown
  Description of Unknown: gRNA target site sequence
tggcttgaggcccagtggct

SEQ ID NO: 4867 - DNA, 20 bp, Unknown
  Description of Unknown: gRNA target site sequence
ggcttgaggcccagtggctg

SEQ ID NO: 4868 - DNA, 20 bp, Unknown
  Description of Unknown: gRNA target site sequence
gcttgaggcccagtggctga

SEQ ID NO: 4869 - DNA, 20 bp, Unknown
  Description of Unknown: gRNA target site sequence
gaggcccagtggctgagggc

SEQ ID NO: 4870 - DNA, 20 bp, Unknown
  Description of Unknown: gRNA target site sequence
cagtggctgagggctggtgc

SEQ ID NO: 4871 - DNA, 20 bp, Unknown
  Description of Unknown: gRNA target site sequence
ggctgagggctggtgcaagc

SEQ ID NO: 4872 - DNA, 20 bp, Unknown
  Description of Unknown: gRNA target site sequence
gagggctggtgcaagccaga

SEQ ID NO: 4873 - DNA, 20 bp, Unknown
  Description of Unknown: gRNA target site sequence
agggctggtgcaagccagac

SEQ ID NO: 4874 - DNA, 20 bp, Unknown
  Description of Unknown: gRNA target site sequence
tggtgcaagccagacaggaa

SEQ ID NO: 4875 - DNA, 20 bp, Unknown
  Description of Unknown: gRNA target site sequence
ggtgcaagccagacaggaaa

SEQ ID NO: 4876 - DNA, 20 bp, Unknown
  Description of Unknown: gRNA target site sequence
gtgcaagccagacaggaaaa

SEQ ID NO: 4877 - DNA, 20 bp, Unknown
  Description of Unknown: gRNA target site sequence
agccagacaggaaaagggtt

SEQ ID NO: 4878 - DNA, 20 bp, Unknown
  Description of Unknown: gRNA target site sequence
aggaaaagggttgagcctgt

SEQ ID NO: 4879 - DNA, 20 bp, Unknown
  Description of Unknown: gRNA target site sequence
agggttgagcctgtcagcgc

SEQ ID NO: 4880 - DNA, 20 bp, Unknown
  Description of Unknown: gRNA target site sequence
tgagcctgtcagcgccagca

SEQ ID NO: 4881 - DNA, 20 bp, Unknown
  Description of Unknown: gRNA target site sequence
tgtcagcgccagcacagatc

SEQ ID NO: 4882 - DNA, 20 bp, Unknown
  Description of Unknown: gRNA target site sequence
agcgccagcacagatcaagt

SEQ ID NO: 4883 - DNA, 20 bp, Unknown
  Description of Unknown: gRNA target site sequence
gcgccagcacagatcaagtc

SEQ ID NO: 4884 - DNA, 20 bp, Unknown
  Description of Unknown: gRNA target site sequence
gccagcacagatcaagtcag

SEQ ID NO: 4885 - DNA, 20 bp, Unknown
  Description of Unknown: gRNA target site sequence
agcacagatcaagtcaggag

SEQ ID NO: 4886 - DNA, 20 bp, Unknown
  Description of Unknown: gRNA target site sequence
gcacagatcaagtcaggagc

SEQ ID NO: 4887 - DNA, 20 bp, Unknown
  Description of Unknown: gRNA target site sequence
caccaatgtgtgcaaataaa

SEQ ID NO: 4888 - DNA, 20 bp, Unknown
  Description of Unknown: gRNA target site sequence
caatgtgtgcaaataaatag

SEQ ID NO: 4889 - DNA, 20 bp, Unknown
  Description of Unknown: gRNA target site sequence
tgtgcaaataaatagcagct

SEQ ID NO: 4890 - DNA, 20 bp, Unknown
  Description of Unknown: gRNA target site sequence
ataaatagcagctaagtttc

SEQ ID NO: 4891 - DNA, 20 bp, Unknown
  Description of Unknown: gRNA target site sequence
gcagctaagtttccagttac

SEQ ID NO: 4892 - DNA, 20 bp, Unknown
  Description of Unknown: gRNA target site sequence
ccagttacaagaacaatgca

SEQ ID NO: 4893 - DNA, 20 bp, Unknown
  Description of Unknown: gRNA target site sequence
ttacaagaacaatgcacaga

SEQ ID NO: 4894 - DNA, 20 bp, Unknown
  Description of Unknown: gRNA target site sequence
gaacaatgcacagatggtcc

SEQ ID NO: 4895 - DNA, 20 bp, Unknown
  Description of Unknown: gRNA target site sequence
aacaatgcacagatggtccc

SEQ ID NO: 4896 - DNA, 20 bp, Unknown
  Description of Unknown: gRNA target site sequence
acaatgcacagatggtccca

SEQ ID NO: 4897 - DNA, 20 bp, Unknown
  Description of Unknown: gRNA target site sequence
agatggtcccagggacattg

SEQ ID NO: 4898 - DNA, 20 bp, Unknown
  Description of Unknown: gRNA target site sequence
gtcccagggacattgcggtg

SEQ ID NO: 4899 - DNA, 20 bp, Unknown
  Description of Unknown: gRNA target site sequence
gacattgcggtgtggacaca

SEQ ID NO: 4900 - DNA, 20 bp, Unknown
  Description of Unknown: gRNA target site sequence
attgcggtgtggacacacag

SEQ ID NO: 4901 - DNA, 20 bp, Unknown
  Description of Unknown: gRNA target site sequence
agcggccattgtcctgtcgc

SEQ ID NO: 4902 - DNA, 20 bp, Unknown
  Description of Unknown: gRNA target site sequence
gtcgccagcacctcgcccta

SEQ ID NO: 4903 - DNA, 20 bp, Unknown
  Description of Unknown: gRNA target site sequence
ccagcacctcgccctacagc

SEQ ID NO: 4904 - DNA, 20 bp, Unknown
  Description of Unknown: gRNA target site sequence
cagcacctcgccctacagct

SEQ ID NO: 4905 - DNA, 20 bp, Unknown
  Description of Unknown: gRNA target site sequence
agcacctcgccctacagctg

SEQ ID NO: 4906 - DNA, 20 bp, Unknown
  Description of Unknown: gRNA target site sequence
gcacctcgccctacagctgg

SEQ ID NO: 4907 - DNA, 20 bp, Unknown
  Description of Unknown: gRNA target site sequence
cacctcgccctacagctggg

SEQ ID NO: 4908 - DNA, 20 bp, Unknown
  Description of Unknown: gRNA target site sequence
cctacagctggggggtccct

SEQ ID NO: 4909 - DNA, 20 bp, Unknown
  Description of Unknown: gRNA target site sequence
gggggtcccttagcacttcc

SEQ ID NO: 4910 - DNA, 20 bp, Unknown
  Description of Unknown: gRNA target site sequence
cttagcacttcctagccatg

SEQ ID NO: 4911 - DNA, 20 bp, Unknown
  Description of Unknown: gRNA target site sequence
ttagcacttcctagccatgc

SEQ ID NO: 4912 - DNA, 20 bp, Unknown
  Description of Unknown: gRNA target site sequence
tagcacttcctagccatgca

SEQ ID NO: 4913 - DNA, 20 bp, Unknown
  Description of Unknown: gRNA target site sequence
ccatgcagggtccctgctca

SEQ ID NO: 4914 - DNA, 20 bp, Unknown
  Description of Unknown: gRNA target site sequence
cacctgcctgtctgtcccga

SEQ ID NO: 4915 - DNA, 20 bp, Unknown
  Description of Unknown: gRNA target site sequence
tgtctgtcccgacagctgca

SEQ ID NO: 4916 - DNA, 20 bp, Unknown
  Description of Unknown: gRNA target site sequence
ctgtcccgacagctgcatgg

SEQ ID NO: 4917 - DNA, 20 bp, Unknown
  Description of Unknown: gRNA target site sequence
cgacagctgcatggcagccc

SEQ ID NO: 4918 - DNA, 20 bp, Unknown
  Description of Unknown: gRNA target site sequence
gctgcatggcagccctggcc

SEQ ID NO: 4919 - DNA, 20 bp, Unknown
  Description of Unknown: gRNA target site sequence
ctgcatggcagccctggcct

SEQ ID NO: 4920 - DNA, 20 bp, Unknown
  Description of Unknown: gRNA target site sequence
gcatggcagccctggcctgg

SEQ ID NO: 4921 - DNA, 20 bp, Unknown
  Description of Unknown: gRNA target site sequence
ggcagccctggcctgggaga

SEQ ID NO: 4922 - DNA, 20 bp, Unknown
  Description of Unknown: gRNA target site sequence
cagccctggcctgggagatg

SEQ ID NO: 4923 - DNA, 20 bp, Unknown
  Description of Unknown: gRNA target site sequence
gcctgggagatggagacccc

SEQ ID NO: 4924 - DNA, 20 bp, Unknown
  Description of Unknown: gRNA target site sequence
cctgggagatggagaccccg

SEQ ID NO: 4925 - DNA, 20 bp, Unknown
  Description of Unknown: gRNA target site sequence
ctgggagatggagaccccga

SEQ ID NO: 4926 - DNA, 20 bp, Unknown
  Description of Unknown: gRNA target site sequence
tgggagatggagaccccgag

SEQ ID NO: 4927 - DNA, 20 bp, Unknown
  Description of Unknown: gRNA target site sequence
agaccccgaggggctgcctg

SEQ ID NO: 4928 - DNA, 20 bp, Unknown
  Description of Unknown: gRNA target site sequence
ccccgaggggctgcctgcgg

SEQ ID NO: 4929 - DNA, 20 bp, Unknown
  Description of Unknown: gRNA target site sequence
cgaggggctgcctgcggtgg

SEQ ID NO: 4930 - DNA, 20 bp, Unknown
  Description of Unknown: gRNA target site sequence
gaggggctgcctgcggtggt

SEQ ID NO: 4931 - DNA, 20 bp, Unknown
  Description of Unknown: gRNA target site sequence
aggggctgcctgcggtggtg

SEQ ID NO: 4932 - DNA, 20 bp, Unknown
  Description of Unknown: gRNA target site sequence
gcctgcggtggtggggcccc

SEQ ID NO: 4933 - DNA, 20 bp, Unknown
  Description of Unknown: gRNA target site sequence
cctgcggtggtggggcccct

SEQ ID NO: 4934 - DNA, 20 bp, Unknown
  Description of Unknown: gRNA target site sequence
ctgggtccccactgcattcc

SEQ ID NO: 4935 - DNA, 20 bp, Unknown
  Description of Unknown: gRNA target site sequence
ccactgcattcccagaaacc

SEQ ID NO: 4936 - DNA, 20 bp, Unknown
  Description of Unknown: gRNA target site sequence
actgcattcccagaaaccca

SEQ ID NO: 4937 - DNA, 20 bp, Unknown
  Description of Unknown: gRNA target site sequence
ctgcattcccagaaacccag

SEQ ID NO: 4938 - DNA, 20 bp, Unknown
  Description of Unknown: gRNA target site sequence
tgcattcccagaaacccaga

SEQ ID NO: 4939 - DNA, 20 bp, Unknown
  Description of Unknown: gRNA target site sequence
attcccagaaacccagaggg

SEQ ID NO: 4940 - DNA, 20 bp, Unknown
  Description of Unknown: gRNA target site sequence
ttcccagaaacccagagggc

SEQ ID NO: 4941 - DNA, 20 bp, Unknown
  Description of Unknown: gRNA target site sequence
tcccagaaacccagagggca

SEQ ID NO: 4942 - DNA, 20 bp, Unknown
  Description of Unknown: gRNA target site sequence
catttcccctgctctgtgcc

SEQ ID NO: 4943 - DNA, 20 bp, Unknown
  Description of Unknown: gRNA target site sequence
tgctctgtgccgagtccacc

SEQ ID NO: 4944 - DNA, 20 bp, Unknown
  Description of Unknown: gRNA target site sequence
gtgccgagtccacccagccc

SEQ ID NO: 4945 - DNA, 20 bp, Unknown
  Description of Unknown: gRNA target site sequence
gagtccacccagccccagcc

SEQ ID NO: 4946 - DNA, 20 bp, Unknown
  Description of Unknown: gRNA target site sequence
agtccacccagccccagcct

SEQ ID NO: 4947 - DNA, 20 bp, Unknown
  Description of Unknown: gRNA target site sequence
acccagccccagcctaggcc

SEQ ID NO: 4948 - DNA, 20 bp, Unknown
  Description of Unknown: gRNA target site sequence
agccccagcctaggcccagt

SEQ ID NO: 4949 - DNA, 20 bp, Unknown
  Description of Unknown: gRNA target site sequence
gccccagcctaggcccagta

SEQ ID NO: 4950 - DNA, 20 bp, Unknown
  Description of Unknown: gRNA target site sequence
ccccagcctaggcccagtaa

SEQ ID NO: 4951 - DNA, 20 bp, Unknown
  Description of Unknown: gRNA target site sequence
cctaggcccagtaagggctg

SEQ ID NO: 4952 - DNA, 20 bp, Unknown
  Description of Unknown: gRNA target site sequence
ggctgcagcccaccctgtcc

SEQ ID NO: 4953 - DNA, 20 bp, Unknown
  Description of Unknown: gRNA target site sequence
gctgcagcccaccctgtccc

SEQ ID NO: 4954 - DNA, 20 bp, Unknown
  Description of Unknown: gRNA target site sequence
ccctgtcccaggctgcctcc

SEQ ID NO: 4955 - DNA, 20 bp, Unknown
  Description of Unknown: gRNA target site sequence
cctgtcccaggctgcctccc

SEQ ID NO: 4956 - DNA, 20 bp, Unknown
  Description of Unknown: gRNA target site sequence
tgtcccaggctgcctcccag

SEQ ID NO: 4957 - DNA, 20 bp, Unknown
  Description of Unknown: gRNA target site sequence
ctgcctcccaggagccctct

SEQ ID NO: 4958 - DNA, 20 bp, Unknown
  Description of Unknown: gRNA target site sequence
agccctcttggccctgatgc

SEQ ID NO: 4959 - DNA, 20 bp, Unknown
  Description of Unknown: gRNA target site sequence
cctcttggccctgatgccag

SEQ ID NO: 4960 - DNA, 20 bp, Unknown
  Description of Unknown: gRNA target site sequence
gaagcccatcttcctccatt

SEQ ID NO: 4961 - DNA, 20 bp, Unknown
  Description of Unknown: gRNA target site sequence
aagcccatcttcctccattc

SEQ ID NO: 4962 - DNA, 20 bp, Unknown
  Description of Unknown: gRNA target site sequence
cccatcttcctccattcagg

SEQ ID NO: 4963 - DNA, 20 bp, Unknown
  Description of Unknown: gRNA target site sequence
ccatcttcctccattcaggc

SEQ ID NO: 4964 - DNA, 20 bp, Unknown
  Description of Unknown: gRNA target site sequence
ctccattcaggcaggtctct

SEQ ID NO: 4965 - DNA, 20 bp, Unknown
  Description of Unknown: gRNA target site sequence
aggcaggtctctgagtgccc

SEQ ID NO: 4966 - DNA, 20 bp, Unknown
  Description of Unknown: gRNA target site sequence
ggtctctgagtgccctggcc

SEQ ID NO: 4967 - DNA, 20 bp, Unknown
  Description of Unknown: gRNA target site sequence
gccctggcctggctgcctgc

SEQ ID NO: 4968 - DNA, 20 bp, Unknown
  Description of Unknown: gRNA target site sequence
cctggctgcctgctggccct

SEQ ID NO: 4969 - DNA, 20 bp, Unknown
  Description of Unknown: gRNA target site sequence
tggctgcctgctggccctga

SEQ ID NO: 4970 - DNA, 20 bp, Unknown
  Description of Unknown: gRNA target site sequence
ctgagagtcacactacccca

SEQ ID NO: 4971 - DNA, 20 bp, Unknown
  Description of Unknown: gRNA target site sequence
cactaccccacagccctcct

SEQ ID NO: 4972 - DNA, 20 bp, Unknown
  Description of Unknown: gRNA target site sequence
tccttggtcaaaatccactc

SEQ ID NO: 4973 - DNA, 20 bp, Unknown
  Description of Unknown: gRNA target site sequence
cttggtcaaaatccactctg

SEQ ID NO: 4974 - DNA, 20 bp, Unknown
  Description of Unknown: gRNA target site sequence
ggtcaaaatccactctggag

SEQ ID NO: 4975 - DNA, 20 bp, Unknown
  Description of Unknown: gRNA target site sequence
aaaatccactctggagtggc

SEQ ID NO: 4976 - DNA, 20 bp, Unknown
  Description of Unknown: gRNA target site sequence
atccactctggagtggctgg

SEQ ID NO: 4977 - DNA, 20 bp, Unknown
  Description of Unknown: gRNA target site sequence
ggagtggctggaagattccc

SEQ ID NO: 4978 - DNA, 20 bp, Unknown
  Description of Unknown: gRNA target site sequence
gagtggctggaagattcccc

SEQ ID NO: 4979 - DNA, 20 bp, Unknown
  Description of Unknown: gRNA target site sequence
ccacgccgcacacgcctatg

SEQ ID NO: 4980 - DNA, 20 bp, Unknown
  Description of Unknown: gRNA target site sequence
cacgccgcacacgcctatgc

SEQ ID NO: 4981 - DNA, 20 bp, Unknown
  Description of Unknown: gRNA target site sequence
acgccgcacacgcctatgca

SEQ ID NO: 4982 - DNA, 20 bp, Unknown
  Description of Unknown: gRNA target site sequence
gccgcacacgcctatgcagg

SEQ ID NO: 4983 - DNA, 20 bp, Unknown
  Description of Unknown: gRNA target site sequence
cctatgcagggagcttcccc

SEQ ID NO: 4984 - DNA, 20 bp, Unknown
  Description of Unknown: gRNA target site sequence
tgcagggagcttcccctggc

SEQ ID NO: 4985 - DNA, 20 bp, Unknown
  Description of Unknown: gRNA target site sequence
gggagcttcccctggccggc

SEQ ID NO: 4986 - DNA, 20 bp, Unknown
  Description of Unknown: gRNA target site sequence
agcttcccctggccggccgg

SEQ ID NO: 4987 - DNA, 20 bp, Unknown
  Description of Unknown: gRNA target site sequence
cccctggccggccggcagac

SEQ ID NO: 4988 - DNA, 20 bp, Unknown
  Description of Unknown: gRNA target site sequence
ccctggccggccggcagaca

SEQ ID NO: 4989 - DNA, 20 bp, Unknown
  Description of Unknown: gRNA target site sequence
cctggccggccggcagacaa

SEQ ID NO: 4990 - DNA, 20 bp, Unknown
  Description of Unknown: gRNA target site sequence
ggccggccggcagacaaggg

SEQ ID NO: 4991 - DNA, 20 bp, Unknown
  Description of Unknown: gRNA target site sequence
ccggcagacaagggcggtct

SEQ ID NO: 4992 - DNA, 20 bp, Unknown
  Description of Unknown: gRNA target site sequence
ggcagacaagggcggtctca

SEQ ID NO: 4993 - DNA, 20 bp, Unknown
  Description of Unknown: gRNA target site sequence
cagacaagggcggtctcaga

SEQ ID NO: 4994 - DNA, 20 bp, Unknown
  Description of Unknown: gRNA target site sequence
agacaagggcggtctcagag

SEQ ID NO: 4995 - DNA, 20 bp, Unknown
  Description of Unknown: gRNA target site sequence
gacaagggcggtctcagaga

SEQ ID NO: 4996 - DNA, 20 bp, Unknown
  Description of Unknown: gRNA target site sequence
acaagggcggtctcagagag

SEQ ID NO: 4997 - DNA, 20 bp, Unknown
  Description of Unknown: gRNA target site sequence
caagggcggtctcagagagg

SEQ ID NO: 4998 - DNA, 20 bp, Unknown
  Description of Unknown: gRNA target site sequence
ctcagagagggggctcacct

SEQ ID NO: 4999 - DNA, 20 bp, Unknown
  Description of Unknown: gRNA target site sequence
agagagggggctcacctcag

SEQ ID NO: 5000 - DNA, 20 bp, Unknown
  Description of Unknown: gRNA target site sequence
cacctcagcagccccttgtg

SEQ ID NO: 5001 - DNA, 20 bp, Unknown
  Description of Unknown: gRNA target site sequence
tcagcagccccttgtgtagc

SEQ ID NO: 5002 - DNA, 20 bp, Unknown
  Description of Unknown: gRNA target site sequence
gccctcgcccctgccacctc

SEQ ID NO: 5003 - DNA, 20 bp, Unknown
  Description of Unknown: gRNA target site sequence
ccctcgcccctgccacctct

SEQ ID NO: 5004 - DNA, 20 bp, Unknown
  Description of Unknown: gRNA target site sequence
gccacctctgggaacaccac

SEQ ID NO: 5005 - DNA, 20 bp, Unknown
  Description of Unknown: gRNA target site sequence
ccacctctgggaacaccacc

SEQ ID NO: 5006 - DNA, 20 bp, Unknown
  Description of Unknown: gRNA target site sequence
cctctgggaacaccaccagg

SEQ ID NO: 5007 - DNA, 20 bp, Unknown
  Description of Unknown: gRNA target site sequence
tgggaacaccaccaggaagc

SEQ ID NO: 5008 - DNA, 20 bp, Unknown
  Description of Unknown: gRNA target site sequence
gggaacaccaccaggaagct

SEQ ID NO: 5009 - DNA, 20 bp, Unknown
  Description of Unknown: gRNA target site sequence
ggaacaccaccaggaagctg

SEQ ID NO: 5010 - DNA, 20 bp, Unknown
  Description of Unknown: gRNA target site sequence
gaacaccaccaggaagctgg

SEQ ID NO: 5011 - DNA, 20 bp, Unknown
  Description of Unknown: gRNA target site sequence
accaccaggaagctggggga

SEQ ID NO: 5012 - DNA, 20 bp, Unknown
  Description of Unknown: gRNA target site sequence
ccaccaggaagctgggggac

SEQ ID NO: 5013 - DNA, 20 bp, Unknown
  Description of Unknown: gRNA target site sequence
gaagctgggggacaggcacg

SEQ ID NO: 5014 - DNA, 20 bp, Unknown
  Description of Unknown: gRNA target site sequence
aagctgggggacaggcacgc

SEQ ID NO: 5015 - DNA, 20 bp, Unknown
  Description of Unknown: gRNA target site sequence
gggggacaggcacgcaggtg

SEQ ID NO: 5016 - DNA, 20 bp, Unknown
  Description of Unknown: gRNA target site sequence
ggggacaggcacgcaggtga

SEQ ID NO: 5017 - DNA, 20 bp, Unknown
  Description of Unknown: gRNA target site sequence
ggacaggcacgcaggtgaag

SEQ ID NO: 5018 - DNA, 20 bp, Unknown
  Description of Unknown: gRNA target site sequence
gacaggcacgcaggtgaagg

SEQ ID NO: 5019 - DNA, 20 bp, Unknown
  Description of Unknown: gRNA target site sequence
ggcacgcaggtgaaggaggc

SEQ ID NO: 5020 - DNA, 20 bp, Unknown
  Description of Unknown: gRNA target site sequence
tgaaggaggcgagcgcttgt

SEQ ID NO: 5021 - DNA, 20 bp, Unknown
  Description of Unknown: gRNA target site sequence
ggaggcgagcgcttgtcagc

SEQ ID NO: 5022 - DNA, 20 bp, Unknown
  Description of Unknown: gRNA target site sequence
gaggcgagcgcttgtcagcc

SEQ ID NO: 5023 - DNA, 20 bp, Unknown
  Description of Unknown: gRNA target site sequence
ggcgagcgcttgtcagccgg

SEQ ID NO: 5024 - DNA, 20 bp, Unknown
  Description of Unknown: gRNA target site sequence
gcgagcgcttgtcagccggg

SEQ ID NO: 5025 - DNA, 20 bp, Unknown
  Description of Unknown: gRNA target site sequence
gcttgtcagccgggaggcca

SEQ ID NO: 5026 - DNA, 20 bp, Unknown
  Description of Unknown: gRNA target site sequence
cttgtcagccgggaggccat

SEQ ID NO: 5027 - DNA, 20 bp, Unknown
  Description of Unknown: gRNA target site sequence
cagccgggaggccatgggca

SEQ ID NO: 5028 - DNA, 20 bp, Unknown
  Description of Unknown: gRNA target site sequence
gccgggaggccatgggcaca

SEQ ID NO: 5029 - DNA, 20 bp, Unknown
  Description of Unknown: gRNA target site sequence
ccgggaggccatgggcacag

SEQ ID NO: 5030 - DNA, 20 bp, Unknown
  Description of Unknown: gRNA target site sequence
cgggaggccatgggcacaga

SEQ ID NO: 5031 - DNA, 20 bp, Unknown
  Description of Unknown: gRNA target site sequence
ggccatgggcacagagggaa

SEQ ID NO: 5032 - DNA, 20 bp, Unknown
  Description of Unknown: gRNA target site sequence
gccatgggcacagagggaac

SEQ ID NO: 5033 - DNA, 20 bp, Unknown
  Description of Unknown: gRNA target site sequence
ccatgggcacagagggaaca

SEQ ID NO: 5034 - DNA, 20 bp, Unknown
  Description of Unknown: gRNA target site sequence
cagagggaacagggacaccc

SEQ ID NO: 5035 - DNA, 20 bp, Unknown
  Description of Unknown: gRNA target site sequence
agagggaacagggacaccct

SEQ ID NO: 5036 - DNA, 20 bp, Unknown
  Description of Unknown: gRNA target site sequence
gggaacagggacaccctggg

SEQ ID NO: 5037 - DNA, 20 bp, Unknown
  Description of Unknown: gRNA target site sequence
gggacaccctgggtggcctc

SEQ ID NO: 5038 - DNA, 20 bp, Unknown
  Description of Unknown: gRNA target site sequence
ggacaccctgggtggcctca

SEQ ID NO: 5039 - DNA, 20 bp, Unknown
  Description of Unknown: gRNA target site sequence
caaacccctcactcgtcccc

SEQ ID NO: 5040 - DNA, 20 bp, Unknown
  Description of Unknown: gRNA target site sequence
aaacccctcactcgtcccct

SEQ ID NO: 5041 - DNA, 20 bp, Unknown
  Description of Unknown: gRNA target site sequence
acccctcactcgtcccctgg

SEQ ID NO: 5042 - DNA, 20 bp, Unknown
  Description of Unknown: gRNA target site sequence
cccctcactcgtcccctggg

SEQ ID NO: 5043 - DNA, 20 bp, Unknown
  Description of Unknown: gRNA target site sequence
ccctcactcgtcccctggga

SEQ ID NO: 5044 - DNA, 20 bp, Unknown
  Description of Unknown: gRNA target site sequence
tcgtcccctgggagggtgcc

SEQ ID NO: 5045 - DNA, 20 bp, Unknown
  Description of Unknown: gRNA target site sequence
cccctgggagggtgcccagt

SEQ ID NO: 5046 - DNA, 20 bp, Unknown
  Description of Unknown: gRNA target site sequence
ccctgggagggtgcccagtg

SEQ ID NO: 5047 - DNA, 20 bp, Unknown
  Description of Unknown: gRNA target site sequence
gggagggtgcccagtgaggt

SEQ ID NO: 5048 - DNA, 20 bp, Unknown
  Description of Unknown: gRNA target site sequence
gtgcccagtgaggttggcac

SEQ ID NO: 5049 - DNA, 20 bp, Unknown
  Description of Unknown: gRNA target site sequence
tgcccagtgaggttggcact

SEQ ID NO: 5050 - DNA, 20 bp, Unknown
  Description of Unknown: gRNA target site sequence
cccagtgaggttggcactag

SEQ ID NO: 5051 - DNA, 20 bp, Unknown
  Description of Unknown: gRNA target site sequence
gtgaggttggcactaggagt

SEQ ID NO: 5052 - DNA, 20 bp, Unknown
  Description of Unknown: gRNA target site sequence
ttggcactaggagttggtcc

SEQ ID NO: 5053 - DNA, 20 bp, Unknown
  Description of Unknown: gRNA target site sequence
agttggtcctggtcacatga

SEQ ID NO: 5054 - DNA, 20 bp, Unknown
  Description of Unknown: gRNA target site sequence
atgacagacccacccacctc

SEQ ID NO: 5055 - DNA, 20 bp, Unknown
  Description of Unknown: gRNA target site sequence
acccacccacctctggtgtc

SEQ ID NO: 5056 - DNA, 20 bp, Unknown
  Description of Unknown: gRNA target site sequence
acccacctctggtgtccagc

SEQ ID NO: 5057 - DNA, 20 bp, Unknown
  Description of Unknown: gRNA target site sequence
ggtgtccagccagcacgccg

SEQ ID NO: 5058 - DNA, 20 bp, Unknown
  Description of Unknown: gRNA target site sequence
gtgtccagccagcacgccgt

SEQ ID NO: 5059 - DNA, 20 bp, Unknown
  Description of Unknown: gRNA target site sequence
ccagccagcacgccgtgggc

SEQ ID NO: 5060 - DNA, 20 bp, Unknown
  Description of Unknown: gRNA target site sequence
cagcacgccgtgggccagcc

SEQ ID NO: 5061 - DNA, 20 bp, Unknown
  Description of Unknown: gRNA target site sequence
gccgtgggccagcctggctg

SEQ ID NO: 5062 - DNA, 20 bp, Unknown
  Description of Unknown: gRNA target site sequence
ccgtgggccagcctggctgc

SEQ ID NO: 5063 - DNA, 20 bp, Unknown
  Description of Unknown: gRNA target site sequence
cgtgggccagcctggctgca

SEQ ID NO: 5064 - DNA, 20 bp, Unknown
  Description of Unknown: gRNA target site sequence
cagcctggctgcagggacac

SEQ ID NO: 5065 - DNA, 20 bp, Unknown
  Description of Unknown: gRNA target site sequence
agcctggctgcagggacacg

SEQ ID NO: 5066 - DNA, 20 bp, Unknown
  Description of Unknown: gRNA target site sequence
gcctggctgcagggacacga

SEQ ID NO: 5067 - DNA, 20 bp, Unknown
  Description of Unknown: gRNA target site sequence
tggctgcagggacacgaggg

SEQ ID NO: 5068 - DNA, 20 bp, Unknown
  Description of Unknown: gRNA target site sequence
ctgcagggacacgagggcag

SEQ ID NO: 5069 - DNA, 20 bp, Unknown
  Description of Unknown: gRNA target site sequence
cagcagccccctcctcctct

SEQ ID NO: 5070 - DNA, 20 bp, Unknown
  Description of Unknown: gRNA target site sequence
agccccctcctcctctgagc

SEQ ID NO: 5071 - DNA, 20 bp, Unknown
  Description of Unknown: gRNA target site sequence
ctctgagctggttgctcctt

SEQ ID NO: 5072 - DNA, 20 bp, Unknown
  Description of Unknown: gRNA target site sequence
gtcatcaccaccgcctgcca

SEQ ID NO: 5073 - DNA, 20 bp, Unknown
  Description of Unknown: gRNA target site sequence
catcaccaccgcctgccacg

SEQ ID NO: 5074 - DNA, 20 bp, Unknown
  Description of Unknown: gRNA target site sequence
atcaccaccgcctgccacgg

SEQ ID NO: 5075 - DNA, 20 bp, Unknown
  Description of Unknown: gRNA target site sequence
gccacggaggccgcctgtcc

SEQ ID NO: 5076 - DNA, 20 bp, Unknown
  Description of Unknown: gRNA target site sequence
ccacggaggccgcctgtccc

SEQ ID NO: 5077 - DNA, 20 bp, Unknown
  Description of Unknown: gRNA target site sequence
cggaggccgcctgtcccagg

SEQ ID NO: 5078 - DNA, 20 bp, Unknown
  Description of Unknown: gRNA target site sequence
aggccgcctgtcccaggaag

SEQ ID NO: 5079 - DNA, 20 bp, Unknown
  Description of Unknown: gRNA target site sequence
gccgcctgtcccaggaagca

SEQ ID NO: 5080 - DNA, 20 bp, Unknown
  Description of Unknown: gRNA target site sequence
ccgcctgtcccaggaagcag

SEQ ID NO: 5081 - DNA, 20 bp, Unknown
  Description of Unknown: gRNA target site sequence
cgcctgtcccaggaagcaga

SEQ ID NO: 5082 - DNA, 20 bp, Unknown
  Description of Unknown: gRNA target site sequence
cccaggaagcagagggaccg

SEQ ID NO: 5083 - DNA, 20 bp, Unknown
  Description of Unknown: gRNA target site sequence
aagcagagggaccgcagctg

SEQ ID NO: 5084 - DNA, 20 bp, Unknown
  Description of Unknown: gRNA target site sequence
gggaccgcagctgtggcaac

SEQ ID NO: 5085 - DNA, 20 bp, Unknown
  Description of Unknown: gRNA target site sequence
ggaccgcagctgtggcaacc

SEQ ID NO: 5086 - DNA, 20 bp, Unknown
  Description of Unknown: gRNA target site sequence
gaccgcagctgtggcaacca

SEQ ID NO: 5087 - DNA, 20 bp, Unknown
  Description of Unknown: gRNA target site sequence
cagctgtggcaaccagggcc

SEQ ID NO: 5088 - DNA, 20 bp, Unknown
  Description of Unknown: gRNA target site sequence
tggtctctgtgtcacctcgc

SEQ ID NO: 5089 - DNA, 20 bp, Unknown
  Description of Unknown: gRNA target site sequence
ggtctctgtgtcacctcgct

SEQ ID NO: 5090 - DNA, 20 bp, Unknown
  Description of Unknown: gRNA target site sequence
gtctctgtgtcacctcgctg

SEQ ID NO: 5091 - DNA, 20 bp, Unknown
  Description of Unknown: gRNA target site sequence
tctctgtgtcacctcgctgg

SEQ ID NO: 5092 - DNA, 20 bp, Unknown
  Description of Unknown: gRNA target site sequence
ctctgtgtcacctcgctggg

SEQ ID NO: 5093 - DNA, 20 bp, Unknown
  Description of Unknown: gRNA target site sequence
cctcgctggggggccgtgcc

SEQ ID NO: 5094 - DNA, 20 bp, Unknown
  Description of Unknown: gRNA target site sequence
ctcgctggggggccgtgccc

SEQ ID NO: 5095 - DNA, 20 bp, Unknown
  Description of Unknown: gRNA target site sequence
ggggggccgtgcccaggcct

SEQ ID NO: 5096 - DNA, 20 bp, Unknown
  Description of Unknown: gRNA target site sequence
ggccgtgcccaggcctgaga

SEQ ID NO: 5097 - DNA, 20 bp, Unknown
  Description of Unknown: gRNA target site sequence
cccaggcctgagacggaact

SEQ ID NO: 5098 - DNA, 20 bp, Unknown
  Description of Unknown: gRNA target site sequence
cctgagacggaactgagtga

SEQ ID NO: 5099 - DNA, 20 bp, Unknown
  Description of Unknown: gRNA target site sequence
ggaactgagtgacagtgcac

SEQ ID NO: 5100 - DNA, 20 bp, Unknown
  Description of Unknown: gRNA target site sequence
gaactgagtgacagtgcact

SEQ ID NO: 5101 - DNA, 20 bp, Unknown
  Description of Unknown: gRNA target site sequence
tgacagtgcactgggtctga

SEQ ID NO: 5102 - DNA, 20 bp, Unknown
  Description of Unknown: gRNA target site sequence
gtgcactgggtctgacagtg

SEQ ID NO: 5103 - DNA, 20 bp, Unknown
  Description of Unknown: gRNA target site sequence
tgcactgggtctgacagtgt

SEQ ID NO: 5104 - DNA, 20 bp, Unknown
  Description of Unknown: gRNA target site sequence
gcactgggtctgacagtgtg

SEQ ID NO: 5105 - DNA, 20 bp, Unknown
  Description of Unknown: gRNA target site sequence
tgggtctgacagtgtggggc

SEQ ID NO: 5106 - DNA, 20 bp, Unknown
  Description of Unknown: gRNA target site sequence
tgtggggctggcgccatgtt

SEQ ID NO: 5107 - DNA, 20 bp, Unknown
  Description of Unknown: gRNA target site sequence
gtggggctggcgccatgttt

SEQ ID NO: 5108 - DNA, 20 bp, Unknown
  Description of Unknown: gRNA target site sequence
tggggctggcgccatgtttg

SEQ ID NO: 5109 - DNA, 20 bp, Unknown
  Description of Unknown: gRNA target site sequence
gccatgtttggggaaccctg

SEQ ID NO: 5110 - DNA, 20 bp, Unknown
  Description of Unknown: gRNA target site sequence
gtttggggaaccctgtggca

SEQ ID NO: 5111 - DNA, 20 bp, Unknown
  Description of Unknown: gRNA target site sequence
tttggggaaccctgtggcat

SEQ ID NO: 5112 - DNA, 20 bp, Unknown
  Description of Unknown: gRNA target site sequence
accctgtggcatgggacctg

SEQ ID NO: 5113 - DNA, 20 bp, Unknown
  Description of Unknown: gRNA target site sequence
ccctgtggcatgggacctgt

SEQ ID NO: 5114 - DNA, 20 bp, Unknown
  Description of Unknown: gRNA target site sequence
gtggcatgggacctgtgggt

SEQ ID NO: 5115 - DNA, 20 bp, Unknown
  Description of Unknown: gRNA target site sequence
catgggacctgtgggtgagc

SEQ ID NO: 5116 - DNA, 20 bp, Unknown
  Description of Unknown: gRNA target site sequence
atgggacctgtgggtgagcc

SEQ ID NO: 5117 - DNA, 20 bp, Unknown
  Description of Unknown: gRNA target site sequence
gggaaaatcaccccgttgca

SEQ ID NO: 5118 - DNA, 20 bp, Unknown
  Description of Unknown: gRNA target site sequence
caccccgttgcatggcatct

SEQ ID NO: 5119 - DNA, 20 bp, Unknown
  Description of Unknown: gRNA target site sequence
accccgttgcatggcatctc

SEQ ID NO: 5120 - DNA, 20 bp, Unknown
  Description of Unknown: gRNA target site sequence
gttgcatggcatctcgggcc

SEQ ID NO: 5121 - DNA, 20 bp, Unknown
  Description of Unknown: gRNA target site sequence
gcatctcgggcctggatctt

SEQ ID NO: 5122 - DNA, 20 bp, Unknown
  Description of Unknown: gRNA target site sequence
tggatcttaagcgcctgtgt

SEQ ID NO: 5123 - DNA, 20 bp, Unknown
  Description of Unknown: gRNA target site sequence
cctgtgttggtgcctccgcc

SEQ ID NO: 5124 - DNA, 20 bp, Unknown
  Description of Unknown: gRNA target site sequence
gtgttggtgcctccgcctgg

SEQ ID NO: 5125 - DNA, 20 bp, Unknown
  Description of Unknown: gRNA target site sequence
ttggtgcctccgcctggcgg

SEQ ID NO: 5126 - DNA, 20 bp, Unknown
  Description of Unknown: gRNA target site sequence
ggtgcctccgcctggcggaa

SEQ ID NO: 5127 - DNA, 20 bp, Unknown
  Description of Unknown: gRNA target site sequence
gcgacccccacgttgccatg

SEQ ID NO: 5128 - DNA, 20 bp, Unknown
  Description of Unknown: gRNA target site sequence
cgacccccacgttgccatgc

SEQ ID NO: 5129 - DNA, 20 bp, Unknown
  Description of Unknown: gRNA target site sequence
cgttgccatgcgggtatccc

SEQ ID NO: 5130 - DNA, 20 bp, Unknown
  Description of Unknown: gRNA target site sequence
ggtatcccaagccctgaccc

SEQ ID NO: 5131 - DNA, 20 bp, Unknown
  Description of Unknown: gRNA target site sequence
atcccaagccctgaccctgg

SEQ ID NO: 5132 - DNA, 20 bp, Unknown
  Description of Unknown: gRNA target site sequence
tcccaagccctgaccctggc

SEQ ID NO: 5133 - DNA, 20 bp, Unknown
  Description of Unknown: gRNA target site sequence
accctggcaggcatatgttt

SEQ ID NO: 5134 - DNA, 20 bp, Unknown
  Description of Unknown: gRNA target site sequence
ccctggcaggcatatgtttc

SEQ ID NO: 5135 - DNA, 20 bp, Unknown
  Description of Unknown: gRNA target site sequence
ctggcaggcatatgtttcag

SEQ ID NO: 5136 - DNA, 20 bp, Unknown
  Description of Unknown: gRNA target site sequence
tggcaggcatatgtttcagg

SEQ ID NO: 5137 - DNA, 20 bp, Unknown
  Description of Unknown: gRNA target site sequence
gtttcaggaggtccttgtct

SEQ ID NO: 5138 - DNA, 20 bp, Unknown
  Description of Unknown: gRNA target site sequence
tttcaggaggtccttgtctt

SEQ ID NO: 5139 - DNA, 20 bp, Unknown
  Description of Unknown: gRNA target site sequence
tcaggaggtccttgtcttgg

SEQ ID NO: 5140 - DNA, 20 bp, Unknown
  Description of Unknown: gRNA target site sequence
aggtccttgtcttgggagcc

SEQ ID NO: 5141 - DNA, 20 bp, Unknown
  Description of Unknown: gRNA target site sequence
ggtccttgtcttgggagccc

SEQ ID NO: 5142 - DNA, 20 bp, Unknown
  Description of Unknown: gRNA target site sequence
gtccttgtcttgggagccca

SEQ ID NO: 5143 - DNA, 20 bp, Unknown
  Description of Unknown: gRNA target site sequence
ttgtcttgggagcccagggt

SEQ ID NO: 5144 - DNA, 20 bp, Unknown
  Description of Unknown: gRNA target site sequence
tgtcttgggagcccagggtc

SEQ ID NO: 5145 - DNA, 20 bp, Unknown
  Description of Unknown: gRNA target site sequence
gtcttgggagcccagggtcg

SEQ ID NO: 5146 - DNA, 20 bp, Unknown
  Description of Unknown: gRNA target site sequence
tcttgggagcccagggtcgg

SEQ ID NO: 5147 - DNA, 20 bp, Unknown
  Description of Unknown: gRNA target site sequence
ccccgtgtctgtccacatcc

SEQ ID NO: 5148 - DNA, 20 bp, Unknown
  Description of Unknown: gRNA target site sequence
tctgtccacatccgagtcaa

SEQ ID NO: 5149 - DNA, 20 bp, Unknown
  Description of Unknown: gRNA target site sequence
aatggcccatctcgtctctg

SEQ ID NO: 5150 - DNA, 20 bp, Unknown
  Description of Unknown: gRNA target site sequence
ctctgaagcatctttgctgt

SEQ ID NO: 5151 - DNA, 20 bp, Unknown
  Description of Unknown: gRNA target site sequence
agcatctttgctgtgagctc

SEQ ID NO: 5152 - DNA, 20 bp, Unknown
  Description of Unknown: gRNA target site sequence
tctagtccccactgtcttgc

SEQ ID NO: 5153 - DNA, 20 bp, Unknown
  Description of Unknown: gRNA target site sequence
cactgtcttgctggaaaatg

SEQ ID NO: 5154 - DNA, 20 bp, Unknown
  Description of Unknown: gRNA target site sequence
ctgtcttgctggaaaatgtg

SEQ ID NO: 5155 - DNA, 20 bp, Unknown
  Description of Unknown: gRNA target site sequence
tgtcttgctggaaaatgtgg

SEQ ID NO: 5156 - DNA, 20 bp, Unknown
  Description of Unknown: gRNA target site sequence
aggccccactgcccactgcc

SEQ ID NO: 5157 - DNA, 20 bp, Unknown
  Description of Unknown: gRNA target site sequence
ggccccactgcccactgccc

SEQ ID NO: 5158 - DNA, 20 bp, Unknown
  Description of Unknown: gRNA target site sequence
gccccactgcccactgccca

SEQ ID NO: 5159 - DNA, 20 bp, Unknown
  Description of Unknown: gRNA target site sequence
ccactgcccactgcccaggg

SEQ ID NO: 5160 - DNA, 20 bp, Unknown
  Description of Unknown: gRNA target site sequence
gcagcaatgcccataccacg

SEQ ID NO: 5161 - DNA, 20 bp, Unknown
  Description of Unknown: gRNA target site sequence
atgcccataccacgtggtcc

SEQ ID NO: 5162 - DNA, 20 bp, Unknown
  Description of Unknown: gRNA target site sequence
taccacgtggtcccagctcc

SEQ ID NO: 5163 - DNA, 20 bp, Unknown
  Description of Unknown: gRNA target site sequence
agctccgagcttgtcctgaa

SEQ ID NO: 5164 - DNA, 20 bp, Unknown
  Description of Unknown: gRNA target site sequence
gctccgagcttgtcctgaaa

SEQ ID NO: 5165 - DNA, 20 bp, Unknown
  Description of Unknown: gRNA target site sequence
ctccgagcttgtcctgaaaa

SEQ ID NO: 5166 - DNA, 20 bp, Unknown
  Description of Unknown: gRNA target site sequence
tccgagcttgtcctgaaaag

SEQ ID NO: 5167 - DNA, 20 bp, Unknown
  Description of Unknown: gRNA target site sequence
ccgagcttgtcctgaaaagg

SEQ ID NO: 5168 - DNA, 20 bp, Unknown
  Description of Unknown: gRNA target site sequence
cttgtcctgaaaagggggca

SEQ ID NO: 5169 - DNA, 20 bp, Unknown
  Description of Unknown: gRNA target site sequence
cctgaaaagggggcaaagac

SEQ ID NO: 5170 - DNA, 20 bp, Unknown
  Description of Unknown: gRNA target site sequence
gggggcaaagactggaccct

SEQ ID NO: 5171 - DNA, 20 bp, Unknown
  Description of Unknown: gRNA target site sequence
gactggaccctgagcctgcc

SEQ ID NO: 5172 - DNA, 20 bp, Unknown
  Description of Unknown: gRNA target site sequence
actggaccctgagcctgcca

SEQ ID NO: 5173 - DNA, 20 bp, Unknown
  Description of Unknown: gRNA target site sequence
ctggaccctgagcctgccaa

SEQ ID NO: 5174 - DNA, 20 bp, Unknown
  Description of Unknown: gRNA target site sequence
tggaccctgagcctgccaag

SEQ ID NO: 5175 - DNA, 20 bp, Unknown
  Description of Unknown: gRNA target site sequence
ccaaggggccacactcctcc

SEQ ID NO: 5176 - DNA, 20 bp, Unknown
  Description of Unknown: gRNA target site sequence
caaggggccacactcctccc

SEQ ID NO: 5177 - DNA, 20 bp, Unknown
  Description of Unknown: gRNA target site sequence
aaggggccacactcctccca

SEQ ID NO: 5178 - DNA, 20 bp, Unknown
  Description of Unknown: gRNA target site sequence
ggccacactcctcccagggc

SEQ ID NO: 5179 - DNA, 20 bp, Unknown
  Description of Unknown: gRNA target site sequence
gccacactcctcccagggct

SEQ ID NO: 5180 - DNA, 20 bp, Unknown
  Description of Unknown: gRNA target site sequence
ccacactcctcccagggctg

SEQ ID NO: 5181 - DNA, 20 bp, Unknown
  Description of Unknown: gRNA target site sequence
tcccagggctggggtctcca

SEQ ID NO: 5182 - DNA, 20 bp, Unknown
  Description of Unknown: gRNA target site sequence
cccagggctggggtctccat

SEQ ID NO: 5183 - DNA, 20 bp, Unknown
  Description of Unknown: gRNA target site sequence
agggctggggtctccatggg

SEQ ID NO: 5184 - DNA, 20 bp, Unknown
  Description of Unknown: gRNA target site sequence
tgggcagccccccacccacc

SEQ ID NO: 5185 - DNA, 20 bp, Unknown
  Description of Unknown: gRNA target site sequence
agccccccacccacccagac

SEQ ID NO: 5186 - DNA, 20 bp, Unknown
  Description of Unknown: gRNA target site sequence
ccagttacactcccctgtgc

SEQ ID NO: 5187 - DNA, 20 bp, Unknown
  Description of Unknown: gRNA target site sequence
agttacactcccctgtgcca

SEQ ID NO: 5188 - DNA, 20 bp, Unknown
  Description of Unknown: gRNA target site sequence
tacactcccctgtgccagag

SEQ ID NO: 5189 - DNA, 20 bp, Unknown
  Description of Unknown: gRNA target site sequence
tcccctgtgccagagcagtg

SEQ ID NO: 5190 - DNA, 20 bp, Unknown
  Description of Unknown: gRNA target site sequence
ctgtgccagagcagtgcaga

SEQ ID NO: 5191 - DNA, 20 bp, Unknown
  Description of Unknown: gRNA target site sequence
tgtgccagagcagtgcagac

SEQ ID NO: 5192 - DNA, 20 bp, Unknown
  Description of Unknown: gRNA target site sequence
cagagcagtgcagacaggac

SEQ ID NO: 5193 - DNA, 20 bp, Unknown
  Description of Unknown: gRNA target site sequence
agagcagtgcagacaggacc

SEQ ID NO: 5194 - DNA, 20 bp, Unknown
  Description of Unknown: gRNA target site sequence
cagtgcagacaggaccaggc

SEQ ID NO: 5195 - DNA, 20 bp, Unknown
  Description of Unknown: gRNA target site sequence
agtgcagacaggaccaggcc

SEQ ID NO: 5196 - DNA, 20 bp, Unknown
  Description of Unknown: gRNA target site sequence
aggaccaggccaggatgccc

SEQ ID NO: 5197 - DNA, 20 bp, Unknown
  Description of Unknown: gRNA target site sequence
ggaccaggccaggatgccca

SEQ ID NO: 5198 - DNA, 20 bp, Unknown
  Description of Unknown: gRNA target site sequence
gaccaggccaggatgcccaa

SEQ ID NO: 5199 - DNA, 20 bp, Unknown
  Description of Unknown: gRNA target site sequence
aggccaggatgcccaagggt

SEQ ID NO: 5200 - DNA, 20 bp, Unknown
  Description of Unknown: gRNA target site sequence
ggccaggatgcccaagggtc

SEQ ID NO: 5201 - DNA, 20 bp, Unknown
  Description of Unknown: gRNA target site sequence
gccaggatgcccaagggtca

SEQ ID NO: 5202 - DNA, 20 bp, Unknown
  Description of Unknown: gRNA target site sequence
ccaggatgcccaagggtcag

SEQ ID NO: 5203 - DNA, 20 bp, Unknown
  Description of Unknown: gRNA target site sequence
gatgcccaagggtcaggggc

SEQ ID NO: 5204 - DNA, 20 bp, Unknown
  Description of Unknown: gRNA target site sequence
atgcccaagggtcaggggct

SEQ ID NO: 5205 - DNA, 20 bp, Unknown
  Description of Unknown: gRNA target site sequence
tgcccaagggtcaggggctg

SEQ ID NO: 5206 - DNA, 20 bp, Unknown
  Description of Unknown: gRNA target site sequence
caagggtcaggggctgggga

SEQ ID NO: 5207 - DNA, 20 bp, Unknown
  Description of Unknown: gRNA target site sequence
aagggtcaggggctggggat

SEQ ID NO: 5208 - DNA, 20 bp, Unknown
  Description of Unknown: gRNA target site sequence
ggtcaggggctggggatggg

SEQ ID NO: 5209 - DNA, 20 bp, Unknown
  Description of Unknown: gRNA target site sequence
ggggatgggtagcccccaaa

SEQ ID NO: 5210 - DNA, 20 bp, Unknown
  Description of Unknown: gRNA target site sequence
agcccccaaacagccctttc

SEQ ID NO: 5211 - DNA, 20 bp, Unknown
  Description of Unknown: gRNA target site sequence
gcccccaaacagccctttct

SEQ ID NO: 5212 - DNA, 20 bp, Unknown
  Description of Unknown: gRNA target site sequence
cccccaaacagccctttctg

SEQ ID NO: 5213 - DNA, 20 bp, Unknown
  Description of Unknown: gRNA target site sequence
ccccaaacagccctttctgg

SEQ ID NO: 5214 - DNA, 20 bp, Unknown
  Description of Unknown: gRNA target site sequence
acagccctttctgggggaac

SEQ ID NO: 5215 - DNA, 20 bp, Unknown
  Description of Unknown: gRNA target site sequence
tctgggggaactggcctcaa

SEQ ID NO: 5216 - DNA, 20 bp, Unknown
  Description of Unknown: gRNA target site sequence
ctgggggaactggcctcaac

SEQ ID NO: 5217 - DNA, 20 bp, Unknown
  Description of Unknown: gRNA target site sequence
tgggggaactggcctcaacg

SEQ ID NO: 5218 - DNA, 20 bp, Unknown
  Description of Unknown: gRNA target site sequence
gggaactggcctcaacgggg

SEQ ID NO: 5219 - DNA, 20 bp, Unknown
  Description of Unknown: gRNA target site sequence
ggaactggcctcaacgggga

SEQ ID NO: 5220 - DNA, 20 bp, Unknown
  Description of Unknown: gRNA target site sequence
gaactggcctcaacggggaa

SEQ ID NO: 5221 - DNA, 20 bp, Unknown
  Description of Unknown: gRNA target site sequence
aactggcctcaacggggaag

SEQ ID NO: 5222 - DNA, 20 bp, Unknown
  Description of Unknown: gRNA target site sequence
actggcctcaacggggaagg

SEQ ID NO: 5223 - DNA, 20 bp, Unknown
  Description of Unknown: gRNA target site sequence
cctcaacggggaagggggtg

SEQ ID NO: 5224 - DNA, 20 bp, Unknown
  Description of Unknown: gRNA target site sequence
ctcaacggggaagggggtga

SEQ ID NO: 5225 - DNA, 20 bp, Unknown
  Description of Unknown: gRNA target site sequence
gggaagggggtgaaggctct

SEQ ID NO: 5226 - DNA, 20 bp, Unknown
  Description of Unknown: gRNA target site sequence
aagggggtgaaggctcttag

SEQ ID NO: 5227 - DNA, 20 bp, Unknown
  Description of Unknown: gRNA target site sequence
agggggtgaaggctcttagt

SEQ ID NO: 5228 - DNA, 20 bp, Unknown
  Description of Unknown: gRNA target site sequence
gaaggctcttagtaggaaat

SEQ ID NO: 5229 - DNA, 20 bp, Unknown
  Description of Unknown: gRNA target site sequence
aaggctcttagtaggaaatc

SEQ ID NO: 5230 - DNA, 20 bp, Unknown
  Description of Unknown: gRNA target site sequence
aggctcttagtaggaaatca

SEQ ID NO: 5231 - DNA, 20 bp, Unknown
  Description of Unknown: gRNA target site sequence
gctcttagtaggaaatcagg

SEQ ID NO: 5232 - DNA, 20 bp, Unknown
  Description of Unknown: gRNA target site sequence
gtaggaaatcagggagaccc

SEQ ID NO: 5233 - DNA, 20 bp, Unknown
  Description of Unknown: gRNA target site sequence
gaaatcagggagacccaagt

SEQ ID NO: 5234 - DNA, 20 bp, Unknown
  Description of Unknown: gRNA target site sequence
aatcagggagacccaagtca

SEQ ID NO: 5235 - DNA, 20 bp, Unknown
  Description of Unknown: gRNA target site sequence
agggagacccaagtcagagc

SEQ ID NO: 5236 - DNA, 20 bp, Unknown
  Description of Unknown: gRNA target site sequence
gggagacccaagtcagagcc

SEQ ID NO: 5237 - DNA, 20 bp, Unknown
  Description of Unknown: gRNA target site sequence
agtcagagccaggtgctgtg

SEQ ID NO: 5238 - DNA, 20 bp, Unknown
  Description of Unknown: gRNA target site sequence
cagagccaggtgctgtgcag

SEQ ID NO: 5239 - DNA, 20 bp, Unknown
  Description of Unknown: gRNA target site sequence
caggtgctgtgcagaagctg

SEQ ID NO: 5240 - DNA, 20 bp, Unknown
  Description of Unknown: gRNA target site sequence
gcagaagctgcagcctcacg

SEQ ID NO: 5241 - DNA, 20 bp, Unknown
  Description of Unknown: gRNA target site sequence
gaagctgcagcctcacgtag

SEQ ID NO: 5242 - DNA, 20 bp, Unknown
  Description of Unknown: gRNA target site sequence
aagctgcagcctcacgtaga

SEQ ID NO: 5243 - DNA, 20 bp, Unknown
  Description of Unknown: gRNA target site sequence
ctgcagcctcacgtagaagg

SEQ ID NO: 5244 - DNA, 20 bp, Unknown
  Description of Unknown: gRNA target site sequence
gcagcctcacgtagaaggaa

SEQ ID NO: 5245 - DNA, 20 bp, Unknown
  Description of Unknown: gRNA target site sequence
cagcctcacgtagaaggaag

SEQ ID NO: 5246 - DNA, 20 bp, Unknown
  Description of Unknown: gRNA target site sequence
cgtagaaggaagaggctctg

SEQ ID NO: 5247 - DNA, 20 bp, Unknown
  Description of Unknown: gRNA target site sequence
agaaggaagaggctctgcag

SEQ ID NO: 5248 - DNA, 20 bp, Unknown
  Description of Unknown: gRNA target site sequence
aaggaagaggctctgcagtg

SEQ ID NO: 5249 - DNA, 20 bp, Unknown
  Description of Unknown: gRNA target site sequence
aggaagaggctctgcagtgg

SEQ ID NO: 5250 - DNA, 20 bp, Unknown
  Description of Unknown: gRNA target site sequence
agaggctctgcagtggaggc

SEQ ID NO: 5251 - DNA, 20 bp, Unknown
  Description of Unknown: gRNA target site sequence
tggaggccagtgcccatccc

SEQ ID NO: 5252 - DNA, 20 bp, Unknown
  Description of Unknown: gRNA target site sequence
ggaggccagtgcccatcccc

SEQ ID NO: 5253 - DNA, 20 bp, Unknown
  Description of Unknown: gRNA target site sequence
ggccagtgcccatccccggg

SEQ ID NO: 5254 - DNA, 20 bp, Unknown
  Description of Unknown: gRNA target site sequence
cagtgcccatccccgggtgg

SEQ ID NO: 5255 - DNA, 20 bp, Unknown
  Description of Unknown: gRNA target site sequence
gtgcccatccccgggtggca

SEQ ID NO: 5256 - DNA, 20 bp, Unknown
  Description of Unknown: gRNA target site sequence
tgcccatccccgggtggcag

SEQ ID NO: 5257 - DNA, 20 bp, Unknown
  Description of Unknown: gRNA target site sequence
tccccgggtggcagaggccc

SEQ ID NO: 5258 - DNA, 20 bp, Unknown
  Description of Unknown: gRNA target site sequence
ccgggtggcagaggccccag

SEQ ID NO: 5259 - DNA, 20 bp, Unknown
  Description of Unknown: gRNA target site sequence
gggtggcagaggccccagca

SEQ ID NO: 5260 - DNA, 20 bp, Unknown
  Description of Unknown: gRNA target site sequence
gagacttctcaatgacattc

SEQ ID NO: 5261 - DNA, 20 bp, Unknown
  Description of Unknown: gRNA target site sequence
cttctcaatgacattccagc

SEQ ID NO: 5262 - DNA, 20 bp, Unknown
  Description of Unknown: gRNA target site sequence
ttctcaatgacattccagct

SEQ ID NO: 5263 - DNA, 20 bp, Unknown
  Description of Unknown: gRNA target site sequence
tctcaatgacattccagctg

SEQ ID NO: 5264 - DNA, 20 bp, Unknown
  Description of Unknown: gRNA target site sequence
caatgacattccagctgggg

SEQ ID NO: 5265 - DNA, 20 bp, Unknown
  Description of Unknown: gRNA target site sequence
tccagctggggtggcccttc

SEQ ID NO: 5266 - DNA, 20 bp, Unknown
  Description of Unknown: gRNA target site sequence
cagctggggtggcccttcca

SEQ ID NO: 5267 - DNA, 20 bp, Unknown
  Description of Unknown: gRNA target site sequence
ttccagagcccttgctgccc

SEQ ID NO: 5268 - DNA, 20 bp, Unknown
  Description of Unknown: gRNA target site sequence
tccagagcccttgctgcccg

SEQ ID NO: 5269 - DNA, 20 bp, Unknown
  Description of Unknown: gRNA target site sequence
ccagagcccttgctgcccga

SEQ ID NO: 5270 - DNA, 20 bp, Unknown
  Description of Unknown: gRNA target site sequence
ccttgctgcccgagggatgt

SEQ ID NO: 5271 - DNA, 20 bp, Unknown
  Description of Unknown: gRNA target site sequence
tgctgcccgagggatgtgag

SEQ ID NO: 5272 - DNA, 20 bp, Unknown
  Description of Unknown: gRNA target site sequence
gctgcccgagggatgtgagc

SEQ ID NO: 5273 - DNA, 20 bp, Unknown
  Description of Unknown: gRNA target site sequence
gcccgagggatgtgagcagg

SEQ ID NO: 5274 - DNA, 20 bp, Unknown
  Description of Unknown: gRNA target site sequence
gagggatgtgagcaggtggc

SEQ ID NO: 5275 - DNA, 20 bp, Unknown
  Description of Unknown: gRNA target site sequence
agggatgtgagcaggtggcc

SEQ ID NO: 5276 - DNA, 20 bp, Unknown
  Description of Unknown: gRNA target site sequence
gggatgtgagcaggtggccg

SEQ ID NO: 5277 - DNA, 20 bp, Unknown
  Description of Unknown: gRNA target site sequence
gatgtgagcaggtggccggg

SEQ ID NO: 5278 - DNA, 20 bp, Unknown
  Description of Unknown: gRNA target site sequence
atgtgagcaggtggccgggg

SEQ ID NO: 5279 - DNA, 20 bp, Unknown
  Description of Unknown: gRNA target site sequence
aggtggccggggaggctttg

SEQ ID NO: 5280 - DNA, 20 bp, Unknown
  Description of Unknown: gRNA target site sequence
ggtggccggggaggctttgt

SEQ ID NO: 5281 - DNA, 20 bp, Unknown
  Description of Unknown: gRNA target site sequence
gtggccggggaggctttgtg

SEQ ID NO: 5282 - DNA, 20 bp, Unknown
  Description of Unknown: gRNA target site sequence
ggaggctttgtggggccacc

SEQ ID NO: 5283 - DNA, 20 bp, Unknown
  Description of Unknown: gRNA target site sequence
cctcacctctctccatctct

SEQ ID NO: 5284 - DNA, 20 bp, Unknown
  Description of Unknown: gRNA target site sequence
tctccatctctcagactccc

SEQ ID NO: 5285 - DNA, 20 bp, Unknown
  Description of Unknown: gRNA target site sequence
catctctcagactccccaga

SEQ ID NO: 5286 - DNA, 20 bp, Unknown
  Description of Unknown: gRNA target site sequence
atctctcagactccccagac

SEQ ID NO: 5287 - DNA, 20 bp, Unknown
  Description of Unknown: gRNA target site sequence
cagactccccagacaggccc

SEQ ID NO: 5288 - DNA, 20 bp, Unknown
  Description of Unknown: gRNA target site sequence
gaacccccccaccttctccc

SEQ ID NO: 5289 - DNA, 20 bp, Unknown
  Description of Unknown: gRNA target site sequence
cttctccccagccctgctcg

SEQ ID NO: 5290 - DNA, 20 bp, Unknown
  Description of Unknown: gRNA target site sequence
agccctgctcgtggtgaccg

SEQ ID NO: 5291 - DNA, 20 bp, Unknown
  Description of Unknown: gRNA target site sequence
gccctgctcgtggtgaccga

SEQ ID NO: 5292 - DNA, 20 bp, Unknown
  Description of Unknown: gRNA target site sequence
ccctgctcgtggtgaccgaa

SEQ ID NO: 5293 - DNA, 20 bp, Unknown
  Description of Unknown: gRNA target site sequence
cctgctcgtggtgaccgaag

SEQ ID NO: 5294 - DNA, 20 bp, Unknown
  Description of Unknown: gRNA target site sequence
gacaacgccaccttcacctg

SEQ ID NO: 5295 - DNA, 20 bp, Unknown
  Description of Unknown: gRNA target site sequence
ctgcagcttctccaacacat

SEQ ID NO: 5296 - DNA, 20 bp, Unknown
  Description of Unknown: gRNA target site sequence
gcagcttctccaacacatcg

SEQ ID NO: 5297 - DNA, 20 bp, Unknown
  Description of Unknown: gRNA target site sequence
agcttctccaacacatcgga

SEQ ID NO: 5298 - DNA, 20 bp, Unknown
  Description of Unknown: gRNA target site sequence
cggagagcttcgtgctaaac

SEQ ID NO: 5299 - DNA, 20 bp, Unknown
  Description of Unknown: gRNA target site sequence
gtgctaaactggtaccgcat

SEQ ID NO: 5300 - DNA, 20 bp, Unknown
  Description of Unknown: gRNA target site sequence
aactggtaccgcatgagccc

SEQ ID NO: 5301 - DNA, 20 bp, Unknown
  Description of Unknown: gRNA target site sequence
accgcatgagccccagcaac

SEQ ID NO: 5302 - DNA, 20 bp, Unknown
  Description of Unknown: gRNA target site sequence
catgagccccagcaaccaga

SEQ ID NO: 5303 - DNA, 20 bp, Unknown
  Description of Unknown: gRNA target site sequence
gccccagcaaccagacggac

SEQ ID NO: 5304 - DNA, 20 bp, Unknown
  Description of Unknown: gRNA target site sequence
cagcaaccagacggacaagc

SEQ ID NO: 5305 - DNA, 20 bp, Unknown
  Description of Unknown: gRNA target site sequence
acaagctggccgccttcccc

SEQ ID NO: 5306 - DNA, 20 bp, Unknown
  Description of Unknown: gRNA target site sequence
caagctggccgccttccccg

SEQ ID NO: 5307 - DNA, 20 bp, Unknown
  Description of Unknown: gRNA target site sequence
gccgccttccccgaggaccg

SEQ ID NO: 5308 - DNA, 20 bp, Unknown
  Description of Unknown: gRNA target site sequence
ccttccccgaggaccgcagc

SEQ ID NO: 5309 - DNA, 20 bp, Unknown
  Description of Unknown: gRNA target site sequence
cccgaggaccgcagccagcc

SEQ ID NO: 5310 - DNA, 20 bp, Unknown
  Description of Unknown: gRNA target site sequence
aggaccgcagccagcccggc

SEQ ID NO: 5311 - DNA, 20 bp, Unknown
  Description of Unknown: gRNA target site sequence
ggaccgcagccagcccggcc

SEQ ID NO: 5312 - DNA, 20 bp, Unknown
  Description of Unknown: gRNA target site sequence
cgtgtcacacaactgcccaa

SEQ ID NO: 5313 - DNA, 20 bp, Unknown
  Description of Unknown: gRNA target site sequence
gtgtcacacaactgcccaac

SEQ ID NO: 5314 - DNA, 20 bp, Unknown
  Description of Unknown: gRNA target site sequence
aacgggcgtgacttccacat

SEQ ID NO: 5315 - DNA, 20 bp, Unknown
  Description of Unknown: gRNA target site sequence
gcgtgacttccacatgagcg

SEQ ID NO: 5316 - DNA, 20 bp, Unknown
  Description of Unknown: gRNA target site sequence
gacttccacatgagcgtggt

SEQ ID NO: 5317 - DNA, 20 bp, Unknown
  Description of Unknown: gRNA target site sequence
acttccacatgagcgtggtc

SEQ ID NO: 5318 - DNA, 20 bp, Unknown
  Description of Unknown: gRNA target site sequence
cttccacatgagcgtggtca

SEQ ID NO: 5319 - DNA, 20 bp, Unknown
  Description of Unknown: gRNA target site sequence
acatgagcgtggtcagggcc

SEQ ID NO: 5320 - DNA, 20 bp, Unknown
  Description of Unknown: gRNA target site sequence
gtcagggcccggcgcaatga

SEQ ID NO: 5321 - DNA, 20 bp, Unknown
  Description of Unknown: gRNA target site sequence
agggcccggcgcaatgacag

SEQ ID NO: 5322 - DNA, 20 bp, Unknown
  Description of Unknown: gRNA target site sequence
gacagcggcacctacctctg

SEQ ID NO: 5323 - DNA, 20 bp, Unknown
  Description of Unknown: gRNA target site sequence
acagcggcacctacctctgt

SEQ ID NO: 5324 - DNA, 20 bp, Unknown
  Description of Unknown: gRNA target site sequence
cagcggcacctacctctgtg

SEQ ID NO: 5325 - DNA, 20 bp, Unknown
  Description of Unknown: gRNA target site sequence
cctctgtggggccatctccc

SEQ ID NO: 5326 - DNA, 20 bp, Unknown
  Description of Unknown: gRNA target site sequence
gggccatctccctggccccc

SEQ ID NO: 5327 - DNA, 20 bp, Unknown
  Description of Unknown: gRNA target site sequence
ggccatctccctggccccca

SEQ ID NO: 5328 - DNA, 20 bp, Unknown
  Description of Unknown: gRNA target site sequence
tctccctggcccccaaggcg

SEQ ID NO: 5329 - DNA, 20 bp, Unknown
  Description of Unknown: gRNA target site sequence
ggcccccaaggcgcagatca

SEQ ID NO: 5330 - DNA, 20 bp, Unknown
  Description of Unknown: gRNA target site sequence
cccccaaggcgcagatcaaa

SEQ ID NO: 5331 - DNA, 20 bp, Unknown
  Description of Unknown: gRNA target site sequence
cccaaggcgcagatcaaaga

SEQ ID NO: 5332 - DNA, 20 bp, Unknown
  Description of Unknown: gRNA target site sequence
cgcagatcaaagagagcctg

SEQ ID NO: 5333 - DNA, 20 bp, Unknown
  Description of Unknown: gRNA target site sequence
gcagatcaaagagagcctgc

SEQ ID NO: 5334 - DNA, 20 bp, Unknown
  Description of Unknown: gRNA target site sequence
gatcaaagagagcctgcggg

SEQ ID NO: 5335 - DNA, 20 bp, Unknown
  Description of Unknown: gRNA target site sequence
tcaaagagagcctgcgggca

SEQ ID NO: 5336 - DNA, 20 bp, Unknown
  Description of Unknown: gRNA target site sequence
gagagcctgcgggcagagct

SEQ ID NO: 5337 - DNA, 20 bp, Unknown
  Description of Unknown: gRNA target site sequence
agagcctgcgggcagagctc

SEQ ID NO: 5338 - DNA, 20 bp, Unknown
  Description of Unknown: gRNA target site sequence
gagcctgcgggcagagctca

SEQ ID NO: 5339 - DNA, 20 bp, Unknown
  Description of Unknown: gRNA target site sequence
gcgggcagagctcagggtga

SEQ ID NO: 5340 - DNA, 20 bp, Unknown
  Description of Unknown: gRNA target site sequence
cgggcagagctcagggtgac

SEQ ID NO: 5341 - DNA, 20 bp, Unknown
  Description of Unknown: gRNA target site sequence
agagctcagggtgacaggtg

SEQ ID NO: 5342 - DNA, 20 bp, Unknown
  Description of Unknown: gRNA target site sequence
cagggtgacaggtgcggcct

SEQ ID NO: 5343 - DNA, 20 bp, Unknown
  Description of Unknown: gRNA target site sequence
gggtgacaggtgcggcctcg

SEQ ID NO: 5344 - DNA, 20 bp, Unknown
  Description of Unknown: gRNA target site sequence
ggtgacaggtgcggcctcgg

SEQ ID NO: 5345 - DNA, 20 bp, Unknown
  Description of Unknown: gRNA target site sequence
aggtgcggcctcggaggccc

SEQ ID NO: 5346 - DNA, 20 bp, Unknown
  Description of Unknown: gRNA target site sequence
ggtgcggcctcggaggcccc

SEQ ID NO: 5347 - DNA, 20 bp, Unknown
  Description of Unknown: gRNA target site sequence
gtgcggcctcggaggccccg

SEQ ID NO: 5348 - DNA, 20 bp, Unknown
  Description of Unknown: gRNA target site sequence
cggcctcggaggccccgggg

SEQ ID NO: 5349 - DNA, 20 bp, Unknown
  Description of Unknown: gRNA target site sequence
ggcctcggaggccccggggc

SEQ ID NO: 5350 - DNA, 20 bp, Unknown
  Description of Unknown: gRNA target site sequence
gcctcggaggccccggggca

SEQ ID NO: 5351 - DNA, 20 bp, Unknown
  Description of Unknown: gRNA target site sequence
cctcggaggccccggggcag

SEQ ID NO: 5352 - DNA, 20 bp, Unknown
  Description of Unknown: gRNA target site sequence
ggaggccccggggcaggggt

SEQ ID NO: 5353 - DNA, 20 bp, Unknown
  Description of Unknown: gRNA target site sequence
ccccggggcaggggtgagct

SEQ ID NO: 5354 - DNA, 20 bp, Unknown
  Description of Unknown: gRNA target site sequence
ggggcaggggtgagctgagc

SEQ ID NO: 5355 - DNA, 20 bp, Unknown
  Description of Unknown: gRNA target site sequence
ggggtgagctgagccggtcc

SEQ ID NO: 5356 - DNA, 20 bp, Unknown
  Description of Unknown: gRNA target site sequence
gggtgagctgagccggtcct

SEQ ID NO: 5357 - DNA, 20 bp, Unknown
  Description of Unknown: gRNA target site sequence
ggtgagctgagccggtcctg

SEQ ID NO: 5358 - DNA, 20 bp, Unknown
  Description of Unknown: gRNA target site sequence
gagctgagccggtcctgggg

SEQ ID NO: 5359 - DNA, 20 bp, Unknown
  Description of Unknown: gRNA target site sequence
agctgagccggtcctggggt

SEQ ID NO: 5360 - DNA, 20 bp, Unknown
  Description of Unknown: gRNA target site sequence
ggtgggtgtcccctcctgca

SEQ ID NO: 5361 - DNA, 20 bp, Unknown
  Description of Unknown: gRNA target site sequence
gtgggtgtcccctcctgcac

SEQ ID NO: 5362 - DNA, 20 bp, Unknown
  Description of Unknown: gRNA target site sequence
tgtcccctcctgcacaggat

SEQ ID NO: 5363 - DNA, 20 bp, Unknown
  Description of Unknown: gRNA target site sequence
gtcccctcctgcacaggatc

SEQ ID NO: 5364 - DNA, 20 bp, Unknown
  Description of Unknown: gRNA target site sequence
cccctcctgcacaggatcag

SEQ ID NO: 5365 - DNA, 20 bp, Unknown
  Description of Unknown: gRNA target site sequence
ctgcacaggatcaggagctc

SEQ ID NO: 5366 - DNA, 20 bp, Unknown
  Description of Unknown: gRNA target site sequence
tgcacaggatcaggagctcc

SEQ ID NO: 5367 - DNA, 20 bp, Unknown
  Description of Unknown: gRNA target site sequence
gcacaggatcaggagctcca

SEQ ID NO: 5368 - DNA, 20 bp, Unknown
  Description of Unknown: gRNA target site sequence
gatcaggagctccagggtcg

SEQ ID NO: 5369 - DNA, 20 bp, Unknown
  Description of Unknown: gRNA target site sequence
atcaggagctccagggtcgt

SEQ ID NO: 5370 - DNA, 20 bp, Unknown
  Description of Unknown: gRNA target site sequence
tcaggagctccagggtcgta

SEQ ID NO: 5371 - DNA, 20 bp, Unknown
  Description of Unknown: gRNA target site sequence
ggagctccagggtcgtaggg

SEQ ID NO: 5372 - DNA, 20 bp, Unknown
  Description of Unknown: gRNA target site sequence
gagctccagggtcgtagggc

SEQ ID NO: 5373 - DNA, 20 bp, Unknown
  Description of Unknown: gRNA target site sequence
agctccagggtcgtagggca

SEQ ID NO: 5374 - DNA, 20 bp, Unknown
  Description of Unknown: gRNA target site sequence
gtcgtagggcagggaccccc

SEQ ID NO: 5375 - DNA, 20 bp, Unknown
  Description of Unknown: gRNA target site sequence
gggcagggaccccccagctc

SEQ ID NO: 5376 - DNA, 20 bp, Unknown
  Description of Unknown: gRNA target site sequence
gggaccccccagctccagtc

SEQ ID NO: 5377 - DNA, 20 bp, Unknown
  Description of Unknown: gRNA target site sequence
ggaccccccagctccagtcc

SEQ ID NO: 5378 - DNA, 20 bp, Unknown
  Description of Unknown: gRNA target site sequence
gaccccccagctccagtcca

SEQ ID NO: 5379 - DNA, 20 bp, Unknown
  Description of Unknown: gRNA target site sequence
ccagggctctgtcctgcacc

SEQ ID NO: 5380 - DNA, 20 bp, Unknown
  Description of Unknown: gRNA target site sequence
cagggctctgtcctgcacct

SEQ ID NO: 5381 - DNA, 20 bp, Unknown
  Description of Unknown: gRNA target site sequence
agggctctgtcctgcacctg

SEQ ID NO: 5382 - DNA, 20 bp, Unknown
  Description of Unknown: gRNA target site sequence
tctgtcctgcacctggggaa

SEQ ID NO: 5383 - DNA, 20 bp, Unknown
  Description of Unknown: gRNA target site sequence
tgcacctggggaatggtgac

SEQ ID NO: 5384 - DNA, 20 bp, Unknown
  Description of Unknown: gRNA target site sequence
tgaccggcatctctgtcctc

SEQ ID NO: 5385 - DNA, 20 bp, Unknown
  Description of Unknown: gRNA target site sequence
gcatctctgtcctctagctc

SEQ ID NO: 5386 - DNA, 20 bp, Unknown
  Description of Unknown: gRNA target site sequence
tctctgtcctctagctctgg

SEQ ID NO: 5387 - DNA, 20 bp, Unknown
  Description of Unknown: gRNA target site sequence
ctctagctctggaagcaccc

SEQ ID NO: 5388 - DNA, 20 bp, Unknown
  Description of Unknown: gRNA target site sequence
tggaagcaccccagcccctc

SEQ ID NO: 5389 - DNA, 20 bp, Unknown
  Description of Unknown: gRNA target site sequence
ccctgacctttgtgcccttc

SEQ ID NO: 5390 - DNA, 20 bp, Unknown
  Description of Unknown: gRNA target site sequence
ctgacctttgtgcccttcca

SEQ ID NO: 5391 - DNA, 20 bp, Unknown
  Description of Unknown: gRNA target site sequence
gacctttgtgcccttccaga

SEQ ID NO: 5392 - DNA, 20 bp, Unknown
  Description of Unknown: gRNA target site sequence
ctttgtgcccttccagagag

SEQ ID NO: 5393 - DNA, 20 bp, Unknown
  Description of Unknown: gRNA target site sequence
tttgtgcccttccagagaga

SEQ ID NO: 5394 - DNA, 20 bp, Unknown
  Description of Unknown: gRNA target site sequence
ttgtgcccttccagagagaa

SEQ ID NO: 5395 - DNA, 20 bp, Unknown
  Description of Unknown: gRNA target site sequence
tgcccttccagagagaaggg

SEQ ID NO: 5396 - DNA, 20 bp, Unknown
  Description of Unknown: gRNA target site sequence
ccttccagagagaagggcag

SEQ ID NO: 5397 - DNA, 20 bp, Unknown
  Description of Unknown: gRNA target site sequence
gagaagggcagaagtgccca

SEQ ID NO: 5398 - DNA, 20 bp, Unknown
  Description of Unknown: gRNA target site sequence
gaagtgcccacagcccaccc

SEQ ID NO: 5399 - DNA, 20 bp, Unknown
  Description of Unknown: gRNA target site sequence
gcccaccccagcccctcacc

SEQ ID NO: 5400 - DNA, 20 bp, Unknown
  Description of Unknown: gRNA target site sequence
cccaccccagcccctcaccc

SEQ ID NO: 5401 - DNA, 20 bp, Unknown
  Description of Unknown: gRNA target site sequence
ccccagcccctcacccaggc

SEQ ID NO: 5402 - DNA, 20 bp, Unknown
  Description of Unknown: gRNA target site sequence
agcccctcacccaggccagc

SEQ ID NO: 5403 - DNA, 20 bp, Unknown
  Description of Unknown: gRNA target site sequence
cctcacccaggccagccggc

SEQ ID NO: 5404 - DNA, 20 bp, Unknown
  Description of Unknown: gRNA target site sequence
agccggccagttccaaaccc

SEQ ID NO: 5405 - DNA, 20 bp, Unknown
  Description of Unknown: gRNA target site sequence
cggccagttccaaaccctgg

SEQ ID NO: 5406 - DNA, 20 bp, Unknown
  Description of Unknown: gRNA target site sequence
cagttccaaaccctggtggt

SEQ ID NO: 5407 - DNA, 20 bp, Unknown
  Description of Unknown: gRNA target site sequence
aaccctggtggttggtgtcg

SEQ ID NO: 5408 - DNA, 20 bp, Unknown
  Description of Unknown: gRNA target site sequence
accctggtggttggtgtcgt

SEQ ID NO: 5409 - DNA, 20 bp, Unknown
  Description of Unknown: gRNA target site sequence
ctggtggttggtgtcgtggg

SEQ ID NO: 5410 - DNA, 20 bp, Unknown
  Description of Unknown: gRNA target site sequence
tggtgtcgtgggcggcctgc

SEQ ID NO: 5411 - DNA, 20 bp, Unknown
  Description of Unknown: gRNA target site sequence
ggtgtcgtgggcggcctgct

SEQ ID NO: 5412 - DNA, 20 bp, Unknown
  Description of Unknown: gRNA target site sequence
gtcgtgggcggcctgctggg

SEQ ID NO: 5413 - DNA, 20 bp, Unknown
  Description of Unknown: gRNA target site sequence
gggcggcctgctgggcagcc

SEQ ID NO: 5414 - DNA, 20 bp, Unknown
  Description of Unknown: gRNA target site sequence
gctgggcagcctggtgctgc

SEQ ID NO: 5415 - DNA, 20 bp, Unknown
  Description of Unknown: gRNA target site sequence
gcagcctggtgctgctagtc

SEQ ID NO: 5416 - DNA, 20 bp, Unknown
  Description of Unknown: gRNA target site sequence
cagcctggtgctgctagtct

SEQ ID NO: 5417 - DNA, 20 bp, Unknown
  Description of Unknown: gRNA target site sequence
ggtgctgctagtctgggtcc

SEQ ID NO: 5418 - DNA, 20 bp, Unknown
  Description of Unknown: gRNA target site sequence
tcctggccgtcatctgctcc

SEQ ID NO: 5419 - DNA, 20 bp, Unknown
  Description of Unknown: gRNA target site sequence
cctggccgtcatctgctccc

SEQ ID NO: 5420 - DNA, 20 bp, Unknown
  Description of Unknown: gRNA target site sequence
catctgctcccgggccgcac

SEQ ID NO: 5421 - DNA, 20 bp, Unknown
  Description of Unknown: gRNA target site sequence
atctgctcccgggccgcacg

SEQ ID NO: 5422 - DNA, 20 bp, Unknown
  Description of Unknown: gRNA target site sequence
cgcacgaggtaacgtcatcc

SEQ ID NO: 5423 - DNA, 20 bp, Unknown
  Description of Unknown: gRNA target site sequence
gtaacgtcatcccagcccct

SEQ ID NO: 5424 - DNA, 20 bp, Unknown
  Description of Unknown: gRNA target site sequence
ctgccctgccctaaccctgc

SEQ ID NO: 5425 - DNA, 20 bp, Unknown
  Description of Unknown: gRNA target site sequence
ccctgccctaaccctgctgg

SEQ ID NO: 5426 - DNA, 20 bp, Unknown
  Description of Unknown: gRNA target site sequence
acctccccccatctccccgc

SEQ ID NO: 5427 - DNA, 20 bp, Unknown
  Description of Unknown: gRNA target site sequence
cctccccccatctccccgcc

SEQ ID NO: 5428 - DNA, 20 bp, Unknown
  Description of Unknown: gRNA target site sequence
ccccatctccccgccaggct

SEQ ID NO: 5429 - DNA, 20 bp, Unknown
  Description of Unknown: gRNA target site sequence
gccaggctaagtccctgatg

SEQ ID NO: 5430 - DNA, 20 bp, Unknown
  Description of Unknown: gRNA target site sequence
ccaggctaagtccctgatga

SEQ ID NO: 5431 - DNA, 20 bp, Unknown
  Description of Unknown: gRNA target site sequence
aagtccctgatgaaggcccc

SEQ ID NO: 5432 - DNA, 20 bp, Unknown
  Description of Unknown: gRNA target site sequence
ctgatgaaggcccctggact

SEQ ID NO: 5433 - DNA, 20 bp, Unknown
  Description of Unknown: gRNA target site sequence
ctggactaagaccccccacc

SEQ ID NO: 5434 - DNA, 20 bp, Unknown
  Description of Unknown: gRNA target site sequence
tggactaagaccccccacct

SEQ ID NO: 5435 - DNA, 20 bp, Unknown
  Description of Unknown: gRNA target site sequence
gactaagaccccccacctag

SEQ ID NO: 5436 - DNA, 20 bp, Unknown
  Description of Unknown: gRNA target site sequence
agaccccccacctaggagca

SEQ ID NO: 5437 - DNA, 20 bp, Unknown
  Description of Unknown: gRNA target site sequence
ccccacctaggagcacggct

SEQ ID NO: 5438 - DNA, 20 bp, Unknown
  Description of Unknown: gRNA target site sequence
cccacctaggagcacggctc

SEQ ID NO: 5439 - DNA, 20 bp, Unknown
  Description of Unknown: gRNA target site sequence
ccacctaggagcacggctca

SEQ ID NO: 5440 - DNA, 20 bp, Unknown
  Description of Unknown: gRNA target site sequence
ctaggagcacggctcagggt

SEQ ID NO: 5441 - DNA, 20 bp, Unknown
  Description of Unknown: gRNA target site sequence
agcacggctcagggtcggcc

SEQ ID NO: 5442 - DNA, 20 bp, Unknown
  Description of Unknown: gRNA target site sequence
agggtcggcctggtgacccc

SEQ ID NO: 5443 - DNA, 20 bp, Unknown
  Description of Unknown: gRNA target site sequence
accccaagtgtgtttctctg

SEQ ID NO: 5444 - DNA, 20 bp, Unknown
  Description of Unknown: gRNA target site sequence
ccccaagtgtgtttctctgc

SEQ ID NO: 5445 - DNA, 20 bp, Unknown
  Description of Unknown: gRNA target site sequence
cccaagtgtgtttctctgca

SEQ ID NO: 5446 - DNA, 20 bp, Unknown
  Description of Unknown: gRNA target site sequence
gtgtttctctgcagggacaa

SEQ ID NO: 5447 - DNA, 20 bp, Unknown
  Description of Unknown: gRNA target site sequence
tgtttctctgcagggacaat

SEQ ID NO: 5448 - DNA, 20 bp, Unknown
  Description of Unknown: gRNA target site sequence
tttctctgcagggacaatag

SEQ ID NO: 5449 - DNA, 20 bp, Unknown
  Description of Unknown: gRNA target site sequence
tctgcagggacaataggagc

SEQ ID NO: 5450 - DNA, 20 bp, Unknown
  Description of Unknown: gRNA target site sequence
ctgcagggacaataggagcc

SEQ ID NO: 5451 - DNA, 20 bp, Unknown
  Description of Unknown: gRNA target site sequence
acaataggagccaggcgcac

SEQ ID NO: 5452 - DNA, 20 bp, Unknown
  Description of Unknown: gRNA target site sequence
taggagccaggcgcaccggc

SEQ ID NO: 5453 - DNA, 20 bp, Unknown
  Description of Unknown: gRNA target site sequence
caggcgcaccggccagcccc

SEQ ID NO: 5454 - DNA, 20 bp, Unknown
  Description of Unknown: gRNA target site sequence
cgcaccggccagcccctggt

SEQ ID NO: 5455 - DNA, 20 bp, Unknown
  Description of Unknown: gRNA target site sequence
atccactgtgccttccttcc

SEQ ID NO: 5456 - DNA, 20 bp, Unknown
  Description of Unknown: gRNA target site sequence
tccactgtgccttccttcct

SEQ ID NO: 5457 - DNA, 20 bp, Unknown
  Description of Unknown: gRNA target site sequence
actgtgccttccttcctggg

SEQ ID NO: 5458 - DNA, 20 bp, Unknown
  Description of Unknown: gRNA target site sequence
ctgtgccttccttcctgggt

SEQ ID NO: 5459 - DNA, 20 bp, Unknown
  Description of Unknown: gRNA target site sequence
tgccttccttcctgggtggg

SEQ ID NO: 5460 - DNA, 20 bp, Unknown
  Description of Unknown: gRNA target site sequence
ccttccttcctgggtgggca

SEQ ID NO: 5461 - DNA, 20 bp, Unknown
  Description of Unknown: gRNA target site sequence
cttccttcctgggtgggcag

SEQ ID NO: 5462 - DNA, 20 bp, Unknown
  Description of Unknown: gRNA target site sequence
ccttcctgggtgggcagagg

SEQ ID NO: 5463 - DNA, 20 bp, Unknown
  Description of Unknown: gRNA target site sequence
tcctgggtgggcagaggtgg

SEQ ID NO: 5464 - DNA, 20 bp, Unknown
  Description of Unknown: gRNA target site sequence
cctgggtgggcagaggtgga

SEQ ID NO: 5465 - DNA, 20 bp, Unknown
  Description of Unknown: gRNA target site sequence
ggtgggcagaggtggaagga

SEQ ID NO: 5466 - DNA, 20 bp, Unknown
  Description of Unknown: gRNA target site sequence
gtgggcagaggtggaaggac

SEQ ID NO: 5467 - DNA, 20 bp, Unknown
  Description of Unknown: gRNA target site sequence
gcagaggtggaaggacaggc

SEQ ID NO: 5468 - DNA, 20 bp, Unknown
  Description of Unknown: gRNA target site sequence
cagaggtggaaggacaggct

SEQ ID NO: 5469 - DNA, 20 bp, Unknown
  Description of Unknown: gRNA target site sequence
aaggacaggctgggaccaca

SEQ ID NO: 5470 - DNA, 20 bp, Unknown
  Description of Unknown: gRNA target site sequence
ggctgggaccacacggcctg

SEQ ID NO: 5471 - DNA, 20 bp, Unknown
  Description of Unknown: gRNA target site sequence
gctgggaccacacggcctgc

SEQ ID NO: 5472 - DNA, 20 bp, Unknown
  Description of Unknown: gRNA target site sequence
gcaggactcacattctatta

SEQ ID NO: 5473 - DNA, 20 bp, Unknown
  Description of Unknown: gRNA target site sequence
gactcacattctattatagc

SEQ ID NO: 5474 - DNA, 20 bp, Unknown
  Description of Unknown: gRNA target site sequence
actcacattctattatagcc

SEQ ID NO: 5475 - DNA, 20 bp, Unknown
  Description of Unknown: gRNA target site sequence
tagccaggaccccacctccc

SEQ ID NO: 5476 - DNA, 20 bp, Unknown
  Description of Unknown: gRNA target site sequence
gaccccacctccccagcccc

SEQ ID NO: 5477 - DNA, 20 bp, Unknown
  Description of Unknown: gRNA target site sequence
accccacctccccagccccc

SEQ ID NO: 5478 - DNA, 20 bp, Unknown
  Description of Unknown: gRNA target site sequence
ccacctccccagcccccagg

SEQ ID NO: 5479 - DNA, 20 bp, Unknown
  Description of Unknown: gRNA target site sequence
ggcagcaacctcaatcccta

SEQ ID NO: 5480 - DNA, 20 bp, Unknown
  Description of Unknown: gRNA target site sequence
caatccctaaagccatgatc

SEQ ID NO: 5481 - DNA, 20 bp, Unknown
  Description of Unknown: gRNA target site sequence
aatccctaaagccatgatct

SEQ ID NO: 5482 - DNA, 20 bp, Unknown
  Description of Unknown: gRNA target site sequence
atccctaaagccatgatctg

SEQ ID NO: 5483 - DNA, 20 bp, Unknown
  Description of Unknown: gRNA target site sequence
aaagccatgatctggggccc

SEQ ID NO: 5484 - DNA, 20 bp, Unknown
  Description of Unknown: gRNA target site sequence
ctggggccccagcccacctg

SEQ ID NO: 5485 - DNA, 20 bp, Unknown
  Description of Unknown: gRNA target site sequence
cccagcccacctgcggtctc

SEQ ID NO: 5486 - DNA, 20 bp, Unknown
  Description of Unknown: gRNA target site sequence
ccagcccacctgcggtctcc

SEQ ID NO: 5487 - DNA, 20 bp, Unknown
  Description of Unknown: gRNA target site sequence
cagcccacctgcggtctccg

SEQ ID NO: 5488 - DNA, 20 bp, Unknown
  Description of Unknown: gRNA target site sequence
agcccacctgcggtctccgg

SEQ ID NO: 5489 - DNA, 20 bp, Unknown
  Description of Unknown: gRNA target site sequence
ctgcggtctccgggggtgcc

SEQ ID NO: 5490 - DNA, 20 bp, Unknown
  Description of Unknown: gRNA target site sequence
cccatgtgtgtgcctgcctg

SEQ ID NO: 5491 - DNA, 20 bp, Unknown
  Description of Unknown: gRNA target site sequence
gtgtgcctgcctgcggtctc

SEQ ID NO: 5492 - DNA, 20 bp, Unknown
  Description of Unknown: gRNA target site sequence
tgtgcctgcctgcggtctcc

SEQ ID NO: 5493 - DNA, 20 bp, Unknown
  Description of Unknown: gRNA target site sequence
gtgcctgcctgcggtctcca

SEQ ID NO: 5494 - DNA, 20 bp, Unknown
  Description of Unknown: gRNA target site sequence
tgcctgcctgcggtctccag

SEQ ID NO: 5495 - DNA, 20 bp, Unknown
  Description of Unknown: gRNA target site sequence
ctgcggtctccaggggtgcc

SEQ ID NO: 5496 - DNA, 20 bp, Unknown
  Description of Unknown: gRNA target site sequence
cccacgcgtgtgcccgcctg

SEQ ID NO: 5497 - DNA, 20 bp, Unknown
  Description of Unknown: gRNA target site sequence
gtgtgcccgcctgcggtctc

SEQ ID NO: 5498 - DNA, 20 bp, Unknown
  Description of Unknown: gRNA target site sequence
tgtgcccgcctgcggtctct

SEQ ID NO: 5499 - DNA, 20 bp, Unknown
  Description of Unknown: gRNA target site sequence
gtgcccgcctgcggtctctg

SEQ ID NO: 5500 - DNA, 20 bp, Unknown
  Description of Unknown: gRNA target site sequence
tgcccgcctgcggtctctgg

SEQ ID NO: 5501 - DNA, 20 bp, Unknown
  Description of Unknown: gRNA target site sequence
ctgcggtctctgggggtgcc

SEQ ID NO: 5502 - DNA, 20 bp, Unknown
  Description of Unknown: gRNA target site sequence
cccacatatgtgcctgcctg

SEQ ID NO: 5503 - DNA, 20 bp, Unknown
  Description of Unknown: gRNA target site sequence
atgtgcctgcctgcggtctc

SEQ ID NO: 5504 - DNA, 20 bp, Unknown
  Description of Unknown: gRNA target site sequence
tgtgcctgcctgcggtctcc

SEQ ID NO: 5505 - DNA, 20 bp, Unknown
  Description of Unknown: gRNA target site sequence
ctgcggtctccaggtgtgcc

SEQ ID NO: 5506 - DNA, 20 bp, Unknown
  Description of Unknown: gRNA target site sequence
ccatgcgtgtgcccacctgc

SEQ ID NO: 5507 - DNA, 20 bp, Unknown
  Description of Unknown: gRNA target site sequence
catgcgtgtgcccacctgcg

SEQ ID NO: 5508 - DNA, 20 bp, Unknown
  Description of Unknown: gRNA target site sequence
atgcgtgtgcccacctgcga

SEQ ID NO: 5509 - DNA, 20 bp, Unknown
  Description of Unknown: gRNA target site sequence
tgtgcccacctgcgagggcg

SEQ ID NO: 5510 - DNA, 20 bp, Unknown
  Description of Unknown: gRNA target site sequence
gtgcccacctgcgagggcgt

SEQ ID NO: 5511 - DNA, 20 bp, Unknown
  Description of Unknown: gRNA target site sequence
tgcccacctgcgagggcgtg

SEQ ID NO: 5512 - DNA, 20 bp, Unknown
  Description of Unknown: gRNA target site sequence
ccacctgcgagggcgtgggg

SEQ ID NO: 5513 - DNA, 20 bp, Unknown
  Description of Unknown: gRNA target site sequence
cacctgcgagggcgtggggt

SEQ ID NO: 5514 - DNA, 20 bp, Unknown
  Description of Unknown: gRNA target site sequence
gcgagggcgtggggtgggct

SEQ ID NO: 5515 - DNA, 20 bp, Unknown
  Description of Unknown: gRNA target site sequence
ggtcatttcttatcttacat

SEQ ID NO: 5516 - DNA, 20 bp, Unknown
  Description of Unknown: gRNA target site sequence
tcatttcttatcttacattg

SEQ ID NO: 5517 - DNA, 20 bp, Unknown
  Description of Unknown: gRNA target site sequence
ttcttatcttacattggaga

SEQ ID NO: 5518 - DNA, 20 bp, Unknown
  Description of Unknown: gRNA target site sequence
tcttatcttacattggagac

SEQ ID NO: 5519 - DNA, 20 bp, Unknown
  Description of Unknown: gRNA target site sequence
ttatcttacattggagacag

SEQ ID NO: 5520 - DNA, 20 bp, Unknown
  Description of Unknown: gRNA target site sequence
atcttacattggagacagga

SEQ ID NO: 5521 - DNA, 20 bp, Unknown
  Description of Unknown: gRNA target site sequence
tggagacaggagagcttgaa

SEQ ID NO: 5522 - DNA, 20 bp, Unknown
  Description of Unknown: gRNA target site sequence
gagcttgaaaagtcacattt

SEQ ID NO: 5523 - DNA, 20 bp, Unknown
  Description of Unknown: gRNA target site sequence
ttttggaatcctaaatctgc

SEQ ID NO: 5524 - DNA, 20 bp, Unknown
  Description of Unknown: gRNA target site sequence
tcctaaatctgcaagaatgc

SEQ ID NO: 5525 - DNA, 20 bp, Unknown
  Description of Unknown: gRNA target site sequence
cctaaatctgcaagaatgcc

SEQ ID NO: 5526 - DNA, 20 bp, Unknown
  Description of Unknown: gRNA target site sequence
ctaaatctgcaagaatgcca

SEQ ID NO: 5527 - DNA, 20 bp, Unknown
  Description of Unknown: gRNA target site sequence
caagaatgccagggacattt

SEQ ID NO: 5528 - DNA, 20 bp, Unknown
  Description of Unknown: gRNA target site sequence
agaatgccagggacatttca

SEQ ID NO: 5529 - DNA, 20 bp, Unknown
  Description of Unknown: gRNA target site sequence
gaatgccagggacatttcag

SEQ ID NO: 5530 - DNA, 20 bp, Unknown
  Description of Unknown: gRNA target site sequence
aatgccagggacatttcaga

SEQ ID NO: 5531 - DNA, 20 bp, Unknown
  Description of Unknown: gRNA target site sequence
atgccagggacatttcagag

SEQ ID NO: 5532 - DNA, 20 bp, Unknown
  Description of Unknown: gRNA target site sequence
tgccagggacatttcagagg

SEQ ID NO: 5533 - DNA, 20 bp, Unknown
  Description of Unknown: gRNA target site sequence
acatttcagagggggacatt

SEQ ID NO: 5534 - DNA, 20 bp, Unknown
  Description of Unknown: gRNA target site sequence
ttcagagggggacattgagc

SEQ ID NO: 5535 - DNA, 20 bp, Unknown
  Description of Unknown: gRNA target site sequence
cagagggggacattgagcca

SEQ ID NO: 5536 - DNA, 20 bp, Unknown
  Description of Unknown: gRNA target site sequence
gagggggacattgagccaga

SEQ ID NO: 5537 - DNA, 20 bp, Unknown
  Description of Unknown: gRNA target site sequence
agggggacattgagccagag

SEQ ID NO: 5538 - DNA, 20 bp, Unknown
  Description of Unknown: gRNA target site sequence
ggggacattgagccagagag

SEQ ID NO: 5539 - DNA, 20 bp, Unknown
  Description of Unknown: gRNA target site sequence
gggacattgagccagagagg

SEQ ID NO: 5540 - DNA, 20 bp, Unknown
  Description of Unknown: gRNA target site sequence
ggacattgagccagagagga

SEQ ID NO: 5541 - DNA, 20 bp, Unknown
  Description of Unknown: gRNA target site sequence
gacattgagccagagaggag

SEQ ID NO: 5542 - DNA, 20 bp, Unknown
  Description of Unknown: gRNA target site sequence
attgagccagagaggagggg

SEQ ID NO: 5543 - DNA, 20 bp, Unknown
  Description of Unknown: gRNA target site sequence
gagaggaggggtggtgtccc

SEQ ID NO: 5544 - DNA, 20 bp, Unknown
  Description of Unknown: gRNA target site sequence
ggtggtgtccccagatcaca

SEQ ID NO: 5545 - DNA, 20 bp, Unknown
  Description of Unknown: gRNA target site sequence
tggtgtccccagatcacaca

SEQ ID NO: 5546 - DNA, 20 bp, Unknown
  Description of Unknown: gRNA target site sequence
ggtgtccccagatcacacag

SEQ ID NO: 5547 - DNA, 20 bp, Unknown
  Description of Unknown: gRNA target site sequence
gtgtccccagatcacacaga

SEQ ID NO: 5548 - DNA, 20 bp, Unknown
  Description of Unknown: gRNA target site sequence
tccccagatcacacagaggg

SEQ ID NO: 5549 - DNA, 20 bp, Unknown
  Description of Unknown: gRNA target site sequence
ccagatcacacagagggcag

SEQ ID NO: 5550 - DNA, 20 bp, Unknown
  Description of Unknown: gRNA target site sequence
gatcacacagagggcagtgg

SEQ ID NO: 5551 - DNA, 20 bp, Unknown
  Description of Unknown: gRNA target site sequence
atcacacagagggcagtggt

SEQ ID NO: 5552 - DNA, 20 bp, Unknown
  Description of Unknown: gRNA target site sequence
cacagagggcagtggtggga

SEQ ID NO: 5553 - DNA, 20 bp, Unknown
  Description of Unknown: gRNA target site sequence
agggcagtggtgggacagct

SEQ ID NO: 5554 - DNA, 20 bp, Unknown
  Description of Unknown: gRNA target site sequence
gggcagtggtgggacagctc

SEQ ID NO: 5555 - DNA, 20 bp, Unknown
  Description of Unknown: gRNA target site sequence
ggcagtggtgggacagctca

SEQ ID NO: 5556 - DNA, 20 bp, Unknown
  Description of Unknown: gRNA target site sequence
gtggtgggacagctcagggt

SEQ ID NO: 5557 - DNA, 20 bp, Unknown
  Description of Unknown: gRNA target site sequence
gtgggacagctcagggtaag

SEQ ID NO: 5558 - DNA, 20 bp, Unknown
  Description of Unknown: gRNA target site sequence
agctcagggtaagcagctca

SEQ ID NO: 5559 - DNA, 20 bp, Unknown
  Description of Unknown: gRNA target site sequence
tcagggtaagcagctcatag

SEQ ID NO: 5560 - DNA, 20 bp, Unknown
  Description of Unknown: gRNA target site sequence
cagggtaagcagctcatagt

SEQ ID NO: 5561 - DNA, 20 bp, Unknown
  Description of Unknown: gRNA target site sequence
agggtaagcagctcatagtg

SEQ ID NO: 5562 - DNA, 20 bp, Unknown
  Description of Unknown: gRNA target site sequence
gggtaagcagctcatagtgg

SEQ ID NO: 5563 - DNA, 20 bp, Unknown
  Description of Unknown: gRNA target site sequence
ggtaagcagctcatagtggg

SEQ ID NO: 5564 - DNA, 20 bp, Unknown
  Description of Unknown: gRNA target site sequence
gcagctcatagtggggggcc

SEQ ID NO: 5565 - DNA, 20 bp, Unknown
  Description of Unknown: gRNA target site sequence
cagctcatagtggggggccc

SEQ ID NO: 5566 - DNA, 20 bp, Unknown
  Description of Unknown: gRNA target site sequence
catagtggggggcccaggtt

SEQ ID NO: 5567 - DNA, 20 bp, Unknown
  Description of Unknown: gRNA target site sequence
ggggggcccaggttcggtgc

SEQ ID NO: 5568 - DNA, 20 bp, Unknown
  Description of Unknown: gRNA target site sequence
caggttcggtgccggtactg

SEQ ID NO: 5569 - DNA, 20 bp, Unknown
  Description of Unknown: gRNA target site sequence
ttcggtgccggtactgcagc

SEQ ID NO: 5570 - DNA, 20 bp, Unknown
  Description of Unknown: gRNA target site sequence
tcggtgccggtactgcagcc

SEQ ID NO: 5571 - DNA, 20 bp, Unknown
  Description of Unknown: gRNA target site sequence
ccggtactgcagccaggctg

SEQ ID NO: 5572 - DNA, 20 bp, Unknown
  Description of Unknown: gRNA target site sequence
ggtactgcagccaggctgtg

SEQ ID NO: 5573 - DNA, 20 bp, Unknown
  Description of Unknown: gRNA target site sequence
gcagccaggctgtggagccg

SEQ ID NO: 5574 - DNA, 20 bp, Unknown
  Description of Unknown: gRNA target site sequence
cagccaggctgtggagccgc

SEQ ID NO: 5575 - DNA, 20 bp, Unknown
  Description of Unknown: gRNA target site sequence
agccgcgggcctccttcctg

SEQ ID NO: 5576 - DNA, 20 bp, Unknown
  Description of Unknown: gRNA target site sequence
cgcgggcctccttcctgcgg

SEQ ID NO: 5577 - DNA, 20 bp, Unknown
  Description of Unknown: gRNA target site sequence
gcgggcctccttcctgcggt

SEQ ID NO: 5578 - DNA, 20 bp, Unknown
  Description of Unknown: gRNA target site sequence
ctccttcctgcggtgggccg

SEQ ID NO: 5579 - DNA, 20 bp, Unknown
  Description of Unknown: gRNA target site sequence
tccttcctgcggtgggccgt

SEQ ID NO: 5580 - DNA, 20 bp, Unknown
  Description of Unknown: gRNA target site sequence
ccttcctgcggtgggccgtg

SEQ ID NO: 5581 - DNA, 20 bp, Unknown
  Description of Unknown: gRNA target site sequence
tccctctccctttctcctca

SEQ ID NO: 5582 - DNA, 20 bp, Unknown
  Description of Unknown: gRNA target site sequence
ctctccctttctcctcaaag

SEQ ID NO: 5583 - DNA, 20 bp, Unknown
  Description of Unknown: gRNA target site sequence
tctccctttctcctcaaaga

SEQ ID NO: 5584 - DNA, 20 bp, Unknown
  Description of Unknown: gRNA target site sequence
tccctttctcctcaaagaag

SEQ ID NO: 5585 - DNA, 20 bp, Unknown
  Description of Unknown: gRNA target site sequence
ccctttctcctcaaagaagg

SEQ ID NO: 5586 - DNA, 20 bp, Unknown
  Description of Unknown: gRNA target site sequence
ctcaaagaaggaggacccct

SEQ ID NO: 5587 - DNA, 20 bp, Unknown
  Description of Unknown: gRNA target site sequence
agccgtgcctgtgttctctg

SEQ ID NO: 5588 - DNA, 20 bp, Unknown
  Description of Unknown: gRNA target site sequence
cctgtgttctctgtggacta

SEQ ID NO: 5589 - DNA, 20 bp, Unknown
  Description of Unknown: gRNA target site sequence
ctgtgttctctgtggactat

SEQ ID NO: 5590 - DNA, 20 bp, Unknown
  Description of Unknown: gRNA target site sequence
tgtgttctctgtggactatg

SEQ ID NO: 5591 - DNA, 20 bp, Unknown
  Description of Unknown: gRNA target site sequence
tgttctctgtggactatggg

SEQ ID NO: 5592 - DNA, 20 bp, Unknown
  Description of Unknown: gRNA target site sequence
ctctgtggactatggggagc

SEQ ID NO: 5593 - DNA, 20 bp, Unknown
  Description of Unknown: gRNA target site sequence
actatggggagctggatttc

SEQ ID NO: 5594 - DNA, 20 bp, Unknown
  Description of Unknown: gRNA target site sequence
atggggagctggatttccag

SEQ ID NO: 5595 - DNA, 20 bp, Unknown
  Description of Unknown: gRNA target site sequence
ggagctggatttccagtggc

SEQ ID NO: 5596 - DNA, 20 bp, Unknown
  Description of Unknown: gRNA target site sequence
agctggatttccagtggcga

SEQ ID NO: 5597 - DNA, 20 bp, Unknown
  Description of Unknown: gRNA target site sequence
tggatttccagtggcgagag

SEQ ID NO: 5598 - DNA, 20 bp, Unknown
  Description of Unknown: gRNA target site sequence
ccagtggcgagagaagaccc

SEQ ID NO: 5599 - DNA, 20 bp, Unknown
  Description of Unknown: gRNA target site sequence
agtggcgagagaagaccccg

SEQ ID NO: 5600 - DNA, 20 bp, Unknown
  Description of Unknown: gRNA target site sequence
cccccgtgccctgtgtccct

SEQ ID NO: 5601 - DNA, 20 bp, Unknown
  Description of Unknown: gRNA target site sequence
ccgtgccctgtgtccctgag

SEQ ID NO: 5602 - DNA, 20 bp, Unknown
  Description of Unknown: gRNA target site sequence
gccctgtgtccctgagcaga

SEQ ID NO: 5603 - DNA, 20 bp, Unknown
  Description of Unknown: gRNA target site sequence
cctgtgtccctgagcagacg

SEQ ID NO: 5604 - DNA, 20 bp, Unknown
  Description of Unknown: gRNA target site sequence
tatgccaccattgtctttcc

SEQ ID NO: 5605 - DNA, 20 bp, Unknown
  Description of Unknown: gRNA target site sequence
gccaccattgtctttcctag

SEQ ID NO: 5606 - DNA, 20 bp, Unknown
  Description of Unknown: gRNA target site sequence
cattgtctttcctagcggaa

SEQ ID NO: 5607 - DNA, 20 bp, Unknown
  Description of Unknown: gRNA target site sequence
attgtctttcctagcggaat

SEQ ID NO: 5608 - DNA, 20 bp, Unknown
  Description of Unknown: gRNA target site sequence
ggcacctcatcccccgcccg

SEQ ID NO: 5609 - DNA, 20 bp, Unknown
  Description of Unknown: gRNA target site sequence
gcacctcatcccccgcccgc

SEQ ID NO: 5610 - DNA, 20 bp, Unknown
  Description of Unknown: gRNA target site sequence
cacctcatcccccgcccgca

SEQ ID NO: 5611 - DNA, 20 bp, Unknown
  Description of Unknown: gRNA target site sequence
acctcatcccccgcccgcag

SEQ ID NO: 5612 - DNA, 20 bp, Unknown
  Description of Unknown: gRNA target site sequence
atcccccgcccgcaggggct

SEQ ID NO: 5613 - DNA, 20 bp, Unknown
  Description of Unknown: gRNA target site sequence
gcccgcaggggctcagctga

SEQ ID NO: 5614 - DNA, 20 bp, Unknown
  Description of Unknown: gRNA target site sequence
ggggctcagctgacggccct

SEQ ID NO: 5615 - DNA, 20 bp, Unknown
  Description of Unknown: gRNA target site sequence
ggctcagctgacggccctcg

SEQ ID NO: 5616 - DNA, 20 bp, Unknown
  Description of Unknown: gRNA target site sequence
ctgacggccctcggagtgcc

SEQ ID NO: 5617 - DNA, 20 bp, Unknown
  Description of Unknown: gRNA target site sequence
cctcggagtgcccagccact

SEQ ID NO: 5618 - DNA, 20 bp, Unknown
  Description of Unknown: gRNA target site sequence
ctcggagtgcccagccactg

SEQ ID NO: 5619 - DNA, 20 bp, Unknown
  Description of Unknown: gRNA target site sequence
gtgcccagccactgaggcct

SEQ ID NO: 5620 - DNA, 20 bp, Unknown
  Description of Unknown: gRNA target site sequence
tgcccagccactgaggcctg

SEQ ID NO: 5621 - DNA, 20 bp, Unknown
  Description of Unknown: gRNA target site sequence
cagccactgaggcctgagga

SEQ ID NO: 5622 - DNA, 20 bp, Unknown
  Description of Unknown: gRNA target site sequence
ctgaggatggacactgctct

SEQ ID NO: 5623 - DNA, 20 bp, Unknown
  Description of Unknown: gRNA target site sequence
ctgctcttggcccctctgac

SEQ ID NO: 5624 - DNA, 20 bp, Unknown
  Description of Unknown: gRNA target site sequence
gcccctctgaccggcttcct

SEQ ID NO: 5625 - DNA, 20 bp, Unknown
  Description of Unknown: gRNA target site sequence
tgaccggcttccttggccac

SEQ ID NO: 5626 - DNA, 20 bp, Unknown
  Description of Unknown: gRNA target site sequence
ccttggccaccagtgttctg

SEQ ID NO: 5627 - DNA, 20 bp, Unknown
  Description of Unknown: gRNA target site sequence
ttctgcagaccctccaccat

SEQ ID NO: 5628 - DNA, 20 bp, Unknown
  Description of Unknown: gRNA target site sequence
cagaccctccaccatgagcc

SEQ ID NO: 5629 - DNA, 20 bp, Unknown
  Description of Unknown: gRNA target site sequence
agaccctccaccatgagccc

SEQ ID NO: 5630 - DNA, 20 bp, Unknown
  Description of Unknown: gRNA target site sequence
cctccaccatgagcccgggt

SEQ ID NO: 5631 - DNA, 20 bp, Unknown
  Description of Unknown: gRNA target site sequence
cccgggtcagcgcatttcct

SEQ ID NO: 5632 - DNA, 20 bp, Unknown
  Description of Unknown: gRNA target site sequence
ccgggtcagcgcatttcctc

SEQ ID NO: 5633 - DNA, 20 bp, Unknown
  Description of Unknown: gRNA target site sequence
gggtcagcgcatttcctcag

SEQ ID NO: 5634 - DNA, 20 bp, Unknown
  Description of Unknown: gRNA target site sequence
tcagcgcatttcctcaggag

SEQ ID NO: 5635 - DNA, 20 bp, Unknown
  Description of Unknown: gRNA target site sequence
gcgcatttcctcaggagaag

SEQ ID NO: 5636 - DNA, 20 bp, Unknown
  Description of Unknown: gRNA target site sequence
cgcatttcctcaggagaagc

SEQ ID NO: 5637 - DNA, 20 bp, Unknown
  Description of Unknown: gRNA target site sequence
atttcctcaggagaagcagg

SEQ ID NO: 5638 - DNA, 20 bp, Unknown
  Description of Unknown: gRNA target site sequence
tttcctcaggagaagcaggc

SEQ ID NO: 5639 - DNA, 20 bp, Unknown
  Description of Unknown: gRNA target site sequence
ttcctcaggagaagcaggca

SEQ ID NO: 5640 - DNA, 20 bp, Unknown
  Description of Unknown: gRNA target site sequence
caggagaagcaggcagggtg

SEQ ID NO: 5641 - DNA, 20 bp, Unknown
  Description of Unknown: gRNA target site sequence
aggagaagcaggcagggtgc

SEQ ID NO: 5642 - DNA, 20 bp, Unknown
  Description of Unknown: gRNA target site sequence
aggcagggtgcaggccattg

SEQ ID NO: 5643 - DNA, 20 bp, Unknown
  Description of Unknown: gRNA target site sequence
ggcagggtgcaggccattgc

SEQ ID NO: 5644 - DNA, 20 bp, Unknown
  Description of Unknown: gRNA target site sequence
gcaggccattgcaggccgtc

SEQ ID NO: 5645 - DNA, 20 bp, Unknown
  Description of Unknown: gRNA target site sequence
caggccattgcaggccgtcc

SEQ ID NO: 5646 - DNA, 20 bp, Unknown
  Description of Unknown: gRNA target site sequence
aggccattgcaggccgtcca

SEQ ID NO: 5647 - DNA, 20 bp, Unknown
  Description of Unknown: gRNA target site sequence
ggccattgcaggccgtccag

SEQ ID NO: 5648 - DNA, 20 bp, Unknown
  Description of Unknown: gRNA target site sequence
ttgcaggccgtccaggggct

SEQ ID NO: 5649 - DNA, 20 bp, Unknown
  Description of Unknown: gRNA target site sequence
cgtccaggggctgagctgcc

SEQ ID NO: 5650 - DNA, 20 bp, Unknown
  Description of Unknown: gRNA target site sequence
gtccaggggctgagctgcct

SEQ ID NO: 5651 - DNA, 20 bp, Unknown
  Description of Unknown: gRNA target site sequence
tccaggggctgagctgcctg

SEQ ID NO: 5652 - DNA, 20 bp, Unknown
  Description of Unknown: gRNA target site sequence
ccaggggctgagctgcctgg

SEQ ID NO: 5653 - DNA, 20 bp, Unknown
  Description of Unknown: gRNA target site sequence
ctgagctgcctgggggcgac

SEQ ID NO: 5654 - DNA, 20 bp, Unknown
  Description of Unknown: gRNA target site sequence
tgagctgcctgggggcgacc

SEQ ID NO: 5655 - DNA, 20 bp, Unknown
  Description of Unknown: gRNA target site sequence
gagctgcctgggggcgaccg

SEQ ID NO: 5656 - DNA, 20 bp, Unknown
  Description of Unknown: gRNA target site sequence
cctgggggcgaccggggctc

SEQ ID NO: 5657 - DNA, 20 bp, Unknown
  Description of Unknown: gRNA target site sequence
gctccagcctgcacctgcac

SEQ ID NO: 5658 - DNA, 20 bp, Unknown
  Description of Unknown: gRNA target site sequence
ctccagcctgcacctgcacc

SEQ ID NO: 5659 - DNA, 20 bp, Unknown
  Description of Unknown: gRNA target site sequence
gcctgcacctgcaccaggca

SEQ ID NO: 5660 - DNA, 20 bp, Unknown
  Description of Unknown: gRNA target site sequence
caccaggcacagccccacca

SEQ ID NO: 5661 - DNA, 20 bp, Unknown
  Description of Unknown: gRNA target site sequence
accaggcacagccccaccac

SEQ ID NO: 5662 - DNA, 20 bp, Unknown
  Description of Unknown: gRNA target site sequence
gactcatgtctcaatgccca

SEQ ID NO: 5663 - DNA, 20 bp, Unknown
  Description of Unknown: gRNA target site sequence
catgtctcaatgcccacagt

SEQ ID NO: 5664 - DNA, 20 bp, Unknown
  Description of Unknown: gRNA target site sequence
ctcaatgcccacagtgagcc

SEQ ID NO: 5665 - DNA, 20 bp, Unknown
  Description of Unknown: gRNA target site sequence
tcaatgcccacagtgagccc

SEQ ID NO: 5666 - DNA, 20 bp, Unknown
  Description of Unknown: gRNA target site sequence
atgcccacagtgagcccagg

SEQ ID NO: 5667 - DNA, 20 bp, Unknown
  Description of Unknown: gRNA target site sequence
cccacagtgagcccaggcag

SEQ ID NO: 5668 - DNA, 20 bp, Unknown
  Description of Unknown: gRNA target site sequence
ccacagtgagcccaggcagc

SEQ ID NO: 5669 - DNA, 20 bp, Unknown
  Description of Unknown: gRNA target site sequence
gcaggtgtcaccgtccccta

SEQ ID NO: 5670 - DNA, 20 bp, Unknown
  Description of Unknown: gRNA target site sequence
caggtgtcaccgtcccctac

SEQ ID NO: 5671 - DNA, 20 bp, Unknown
  Description of Unknown: gRNA target site sequence
aggtgtcaccgtcccctaca

SEQ ID NO: 5672 - DNA, 20 bp, Unknown
  Description of Unknown: gRNA target site sequence
gtgtcaccgtcccctacagg

SEQ ID NO: 5673 - DNA, 20 bp, Unknown
  Description of Unknown: gRNA target site sequence
tgtcaccgtcccctacaggg

SEQ ID NO: 5674 - DNA, 20 bp, Unknown
  Description of Unknown: gRNA target site sequence
gtcaccgtcccctacaggga

SEQ ID NO: 5675 - DNA, 20 bp, Unknown
  Description of Unknown: gRNA target site sequence
ccgtcccctacagggagggc

SEQ ID NO: 5676 - DNA, 20 bp, Unknown
  Description of Unknown: gRNA target site sequence
cctacagggagggccagatg

SEQ ID NO: 5677 - DNA, 20 bp, Unknown
  Description of Unknown: gRNA target site sequence
gccagatgcagtcactgctt

SEQ ID NO: 5678 - DNA, 20 bp, Unknown
  Description of Unknown: gRNA target site sequence
ccagatgcagtcactgcttc

SEQ ID NO: 5679 - DNA, 20 bp, Unknown
  Description of Unknown: gRNA target site sequence
gtcactgcttcaggtcctgc

SEQ ID NO: 5680 - DNA, 20 bp, Unknown
  Description of Unknown: gRNA target site sequence
tgcttcaggtcctgccagca

SEQ ID NO: 5681 - DNA, 20 bp, Unknown
  Description of Unknown: gRNA target site sequence
cttcaggtcctgccagcaca

SEQ ID NO: 5682 - DNA, 20 bp, Unknown
  Description of Unknown: gRNA target site sequence
agcacagagctgcctgcgtc

SEQ ID NO: 5683 - DNA, 20 bp, Unknown
  Description of Unknown: gRNA target site sequence
gctgctgctgctgctgcctg

SEQ ID NO: 5684 - DNA, 20 bp, Unknown
  Description of Unknown: gRNA target site sequence
tgctgctgctgcctgcggcc

SEQ ID NO: 5685 - DNA, 20 bp, Unknown
  Description of Unknown: gRNA target site sequence
gctgctgctgcctgcggccc

SEQ ID NO: 5686 - DNA, 20 bp, Unknown
  Description of Unknown: gRNA target site sequence
ctgctgctgcctgcggcccg

SEQ ID NO: 5687 - DNA, 20 bp, Unknown
  Description of Unknown: gRNA target site sequence
ctgcctgcggcccggggctg

SEQ ID NO: 5688 - DNA, 20 bp, Unknown
  Description of Unknown: gRNA target site sequence
tgcctgcggcccggggctga

SEQ ID NO: 5689 - DNA, 20 bp, Unknown
  Description of Unknown: gRNA target site sequence
gcccggggctgaaggcgccg

SEQ ID NO: 5690 - DNA, 20 bp, Unknown
  Description of Unknown: gRNA target site sequence
cgtggccctgcctgacgccc

SEQ ID NO: 5691 - DNA, 20 bp, Unknown
  Description of Unknown: gRNA target site sequence
tggccctgcctgacgccccg

SEQ ID NO: 5692 - DNA, 20 bp, Unknown
  Description of Unknown: gRNA target site sequence
cggagcctcctgcctgaact

SEQ ID NO: 5693 - DNA, 20 bp, Unknown
  Description of Unknown: gRNA target site sequence
ggagcctcctgcctgaactt

SEQ ID NO: 5694 - DNA, 20 bp, Unknown
  Description of Unknown: gRNA target site sequence
gagcctcctgcctgaacttg

SEQ ID NO: 5695 - DNA, 20 bp, Unknown
  Description of Unknown: gRNA target site sequence
agcctcctgcctgaacttgg

SEQ ID NO: 5696 - DNA, 20 bp, Unknown
  Description of Unknown: gRNA target site sequence
tcctgcctgaacttgggggc

SEQ ID NO: 5697 - DNA, 20 bp, Unknown
  Description of Unknown: gRNA target site sequence
gcctgaacttgggggctggt

SEQ ID NO: 5698 - DNA, 20 bp, Unknown
  Description of Unknown: gRNA target site sequence
ctgaacttgggggctggttg

SEQ ID NO: 5699 - DNA, 20 bp, Unknown
  Description of Unknown: gRNA target site sequence
acttgggggctggttggaga

SEQ ID NO: 5700 - DNA, 20 bp, Unknown
  Description of Unknown: gRNA target site sequence
gggctggttggagatggcct

SEQ ID NO: 5701 - DNA, 20 bp, Unknown
  Description of Unknown: gRNA target site sequence
gctggttggagatggccttg

SEQ ID NO: 5702 - DNA, 20 bp, Unknown
  Description of Unknown: gRNA target site sequence
ggttggagatggccttggag

SEQ ID NO: 5703 - DNA, 20 bp, Unknown
  Description of Unknown: gRNA target site sequence
gagatggccttggagcagcc

SEQ ID NO: 5704 - DNA, 20 bp, Unknown
  Description of Unknown: gRNA target site sequence
agatggccttggagcagcca

SEQ ID NO: 5705 - DNA, 20 bp, Unknown
  Description of Unknown: gRNA target site sequence
tggagcagccaaggtgcccc

SEQ ID NO: 5706 - DNA, 20 bp, Unknown
  Description of Unknown: gRNA target site sequence
agcagccaaggtgcccctgg

SEQ ID NO: 5707 - DNA, 20 bp, Unknown
  Description of Unknown: gRNA target site sequence
agccaaggtgcccctggcag

SEQ ID NO: 5708 - DNA, 20 bp, Unknown
  Description of Unknown: gRNA target site sequence
agtggcatcccgaaacgccc

SEQ ID NO: 5709 - DNA, 20 bp, Unknown
  Description of Unknown: gRNA target site sequence
atcccgaaacgccctggacg

SEQ ID NO: 5710 - DNA, 20 bp, Unknown
  Description of Unknown: gRNA target site sequence
tcccgaaacgccctggacgc

SEQ ID NO: 5711 - DNA, 20 bp, Unknown
  Description of Unknown: gRNA target site sequence
cccgaaacgccctggacgca

SEQ ID NO: 5712 - DNA, 20 bp, Unknown
  Description of Unknown: gRNA target site sequence
acgccctggacgcagggccc

SEQ ID NO: 5713 - DNA, 20 bp, Unknown
  Description of Unknown: gRNA target site sequence
ctggacgcagggcccaagac

SEQ ID NO: 5714 - DNA, 20 bp, Unknown
  Description of Unknown: gRNA target site sequence
tggacgcagggcccaagact

SEQ ID NO: 5715 - DNA, 20 bp, Unknown
  Description of Unknown: gRNA target site sequence
gcagggcccaagactgggca

SEQ ID NO: 5716 - DNA, 20 bp, Unknown
  Description of Unknown: gRNA target site sequence
cagggcccaagactgggcac

SEQ ID NO: 5717 - DNA, 20 bp, Unknown
  Description of Unknown: gRNA target site sequence
gggcccaagactgggcacag

SEQ ID NO: 5718 - DNA, 20 bp, Unknown
  Description of Unknown: gRNA target site sequence
cccaagactgggcacaggag

SEQ ID NO: 5719 - DNA, 20 bp, Unknown
  Description of Unknown: gRNA target site sequence
ccaagactgggcacaggagt

SEQ ID NO: 5720 - DNA, 20 bp, Unknown
  Description of Unknown: gRNA target site sequence
aagactgggcacaggagtgg

SEQ ID NO: 5721 - DNA, 20 bp, Unknown
  Description of Unknown: gRNA target site sequence
agactgggcacaggagtggg

SEQ ID NO: 5722 - DNA, 20 bp, Unknown
  Description of Unknown: gRNA target site sequence
gcacaggagtgggaggtaca

SEQ ID NO: 5723 - DNA, 20 bp, Unknown
  Description of Unknown: gRNA target site sequence
cacaggagtgggaggtacat

SEQ ID NO: 5724 - DNA, 20 bp, Unknown
  Description of Unknown: gRNA target site sequence
acaggagtgggaggtacatg

SEQ ID NO: 5725 - DNA, 20 bp, Unknown
  Description of Unknown: gRNA target site sequence
gagtgggaggtacatggggc

SEQ ID NO: 5726 - DNA, 20 bp, Unknown
  Description of Unknown: gRNA target site sequence
agtgggaggtacatggggct

SEQ ID NO: 5727 - DNA, 20 bp, Unknown
  Description of Unknown: gRNA target site sequence
gtgggaggtacatggggctg

SEQ ID NO: 5728 - DNA, 20 bp, Unknown
  Description of Unknown: gRNA target site sequence
acatggggctggggactccc

SEQ ID NO: 5729 - DNA, 20 bp, Unknown
  Description of Unknown: gRNA target site sequence
catggggctggggactcccc

SEQ ID NO: 5730 - DNA, 20 bp, Unknown
  Description of Unknown: gRNA target site sequence
tggggctggggactccccag

SEQ ID NO: 5731 - DNA, 20 bp, Unknown
  Description of Unknown: gRNA target site sequence
caggagttatctgctccctg

SEQ ID NO: 5732 - DNA, 20 bp, Unknown
  Description of Unknown: gRNA target site sequence
aggagttatctgctccctgc

SEQ ID NO: 5733 - DNA, 20 bp, Unknown
  Description of Unknown: gRNA target site sequence
ttatctgctccctgcaggcc

SEQ ID NO: 5734 - DNA, 20 bp, Unknown
  Description of Unknown: gRNA target site sequence
atctgctccctgcaggccta

SEQ ID NO: 5735 - DNA, 20 bp, Unknown
  Description of Unknown: gRNA target site sequence
tgctccctgcaggcctagag

SEQ ID NO: 5736 - DNA, 20 bp, Unknown
  Description of Unknown: gRNA target site sequence
ctgcaggcctagagaagttt

SEQ ID NO: 5737 - DNA, 20 bp, Unknown
  Description of Unknown: gRNA target site sequence
tgcaggcctagagaagtttc

SEQ ID NO: 5738 - DNA, 20 bp, Unknown
  Description of Unknown: gRNA target site sequence
gcaggcctagagaagtttca

SEQ ID NO: 5739 - DNA, 20 bp, Unknown
  Description of Unknown: gRNA target site sequence
ggcctagagaagtttcaggg

SEQ ID NO: 5740 - DNA, 20 bp, Unknown
  Description of Unknown: gRNA target site sequence
gcctagagaagtttcaggga

SEQ ID NO: 5741 - DNA, 20 bp, Unknown
  Description of Unknown: gRNA target site sequence
agagaagtttcagggaaggt

SEQ ID NO: 5742 - DNA, 20 bp, Unknown
  Description of Unknown: gRNA target site sequence
gaagtttcagggaaggtcag

SEQ ID NO: 5743 - DNA, 20 bp, Unknown
  Description of Unknown: gRNA target site sequence
agtttcagggaaggtcagaa

SEQ ID NO: 5744 - DNA, 20 bp, Unknown
  Description of Unknown: gRNA target site sequence
gggaaggtcagaagagctcc

SEQ ID NO: 5745 - DNA, 20 bp, Unknown
  Description of Unknown: gRNA target site sequence
gtcagaagagctcctggctg

SEQ ID NO: 5746 - DNA, 20 bp, Unknown
  Description of Unknown: gRNA target site sequence
agaagagctcctggctgtgg

SEQ ID NO: 5747 - DNA, 20 bp, Unknown
  Description of Unknown: gRNA target site sequence
gaagagctcctggctgtggt

SEQ ID NO: 5748 - DNA, 20 bp, Unknown
  Description of Unknown: gRNA target site sequence
gagctcctggctgtggtggg

SEQ ID NO: 5749 - DNA, 20 bp, Unknown
  Description of Unknown: gRNA target site sequence
agctcctggctgtggtgggc

SEQ ID NO: 5750 - DNA, 20 bp, Unknown
  Description of Unknown: gRNA target site sequence
gctcctggctgtggtgggca

SEQ ID NO: 5751 - DNA, 20 bp, Unknown
  Description of Unknown: gRNA target site sequence
cctggctgtggtgggcaggg

SEQ ID NO: 5752 - DNA, 20 bp, Unknown
  Description of Unknown: gRNA target site sequence
ctggctgtggtgggcagggc

SEQ ID NO: 5753 - DNA, 20 bp, Unknown
  Description of Unknown: gRNA target site sequence
cctccacctttacacatgcc

SEQ ID NO: 5754 - DNA, 20 bp, Unknown
  Description of Unknown: gRNA target site sequence
ctccacctttacacatgccc

SEQ ID NO: 5755 - DNA, 20 bp, Unknown
  Description of Unknown: gRNA target site sequence
cacctttacacatgcccagg

SEQ ID NO: 5756 - DNA, 20 bp, Unknown
  Description of Unknown: gRNA target site sequence
cacatgcccaggcagcacct

SEQ ID NO: 5757 - DNA, 20 bp, Unknown
  Description of Unknown: gRNA target site sequence
acatgcccaggcagcacctc

SEQ ID NO: 5758 - DNA, 20 bp, Unknown
  Description of Unknown: gRNA target site sequence
gcagcacctcaggccctttg

SEQ ID NO: 5759 - DNA, 20 bp, Unknown
  Description of Unknown: gRNA target site sequence
cagcacctcaggccctttgt

SEQ ID NO: 5760 - DNA, 20 bp, Unknown
  Description of Unknown: gRNA target site sequence
agcacctcaggccctttgtg

SEQ ID NO: 5761 - DNA, 20 bp, Unknown
  Description of Unknown: gRNA target site sequence
acctcaggccctttgtgggg

SEQ ID NO: 5762 - DNA, 20 bp, Unknown
  Description of Unknown: gRNA target site sequence
cctcaggccctttgtggggc

SEQ ID NO: 5763 - DNA, 20 bp, Unknown
  Description of Unknown: gRNA target site sequence
ctcaggccctttgtggggca

SEQ ID NO: 5764 - DNA, 20 bp, Unknown
  Description of Unknown: gRNA target site sequence
aggccctttgtggggcaggg

SEQ ID NO: 5765 - DNA, 20 bp, Unknown
  Description of Unknown: gRNA target site sequence
ctttgtggggcagggaagct

SEQ ID NO: 5766 - DNA, 20 bp, Unknown
  Description of Unknown: gRNA target site sequence
tttgtggggcagggaagctg

SEQ ID NO: 5767 - DNA, 20 bp, Unknown
  Description of Unknown: gRNA target site sequence
gtggggcagggaagctgagg

SEQ ID NO: 5768 - DNA, 20 bp, Unknown
  Description of Unknown: gRNA target site sequence
ggcagggaagctgaggcagt

SEQ ID NO: 5769 - DNA, 20 bp, Unknown
  Description of Unknown: gRNA target site sequence
agggaagctgaggcagtaag

SEQ ID NO: 5770 - DNA, 20 bp, Unknown
  Description of Unknown: gRNA target site sequence
gggaagctgaggcagtaagc

SEQ ID NO: 5771 - DNA, 20 bp, Unknown
  Description of Unknown: gRNA target site sequence
aagctgaggcagtaagcggg

SEQ ID NO: 5772 - DNA, 20 bp, Unknown
  Description of Unknown: gRNA target site sequence
agctgaggcagtaagcgggc

SEQ ID NO: 5773 - DNA, 20 bp, Unknown
  Description of Unknown: gRNA target site sequence
tgaggcagtaagcgggcagg

SEQ ID NO: 5774 - DNA, 20 bp, Unknown
  Description of Unknown: gRNA target site sequence
aggcagtaagcgggcaggca

SEQ ID NO: 5775 - DNA, 20 bp, Unknown
  Description of Unknown: gRNA target site sequence
agtaagcgggcaggcagagc

SEQ ID NO: 5776 - DNA, 20 bp, Unknown
  Description of Unknown: gRNA target site sequence
taagcgggcaggcagagctg

SEQ ID NO: 5777 - DNA, 20 bp, Unknown
  Description of Unknown: gRNA target site sequence
aagcgggcaggcagagctgg

SEQ ID NO: 5778 - DNA, 20 bp, Unknown
  Description of Unknown: gRNA target site sequence
aggcagagctggaggccttt

SEQ ID NO: 5779 - DNA, 20 bp, Unknown
  Description of Unknown: gRNA target site sequence
ggcagagctggaggcctttc

SEQ ID NO: 5780 - DNA, 20 bp, Unknown
  Description of Unknown: gRNA target site sequence
agctggaggcctttcaggcc

SEQ ID NO: 5781 - DNA, 20 bp, Unknown
  Description of Unknown: gRNA target site sequence
ggaggcctttcaggcccagc

SEQ ID NO: 5782 - DNA, 20 bp, Unknown
  Description of Unknown: gRNA target site sequence
ttcaggcccagccagcactc

SEQ ID NO: 5783 - DNA, 20 bp, Unknown
  Description of Unknown: gRNA target site sequence
cctgccgccgcattccaccc

SEQ ID NO: 5784 - DNA, 20 bp, Unknown
  Description of Unknown: gRNA target site sequence
ccccagcccctcacaccact

SEQ ID NO: 5785 - DNA, 20 bp, Unknown
  Description of Unknown: gRNA target site sequence
cccagcccctcacaccactc

SEQ ID NO: 5786 - DNA, 20 bp, Unknown
  Description of Unknown: gRNA target site sequence
cagcccctcacaccactcgg

SEQ ID NO: 5787 - DNA, 20 bp, Unknown
  Description of Unknown: gRNA target site sequence
gcccctcacaccactcggga

SEQ ID NO: 5788 - DNA, 20 bp, Unknown
  Description of Unknown: gRNA target site sequence
cccctcacaccactcgggag

SEQ ID NO: 5789 - DNA, 20 bp, Unknown
  Description of Unknown: gRNA target site sequence
ccctcacaccactcgggaga

SEQ ID NO: 5790 - DNA, 20 bp, Unknown
  Description of Unknown: gRNA target site sequence
ctcgggagagggacatccta

SEQ ID NO: 5791 - DNA, 20 bp, Unknown
  Description of Unknown: gRNA target site sequence
gagggacatcctacggtccc

SEQ ID NO: 5792 - DNA, 20 bp, Unknown
  Description of Unknown: gRNA target site sequence
agggacatcctacggtccca

SEQ ID NO: 5793 - DNA, 20 bp, Unknown
  Description of Unknown: gRNA target site sequence
acatcctacggtcccaaggt

SEQ ID NO: 5794 - DNA, 20 bp, Unknown
  Description of Unknown: gRNA target site sequence
catcctacggtcccaaggtc

SEQ ID NO: 5795 - DNA, 20 bp, Unknown
  Description of Unknown: gRNA target site sequence
tcctacggtcccaaggtcag

SEQ ID NO: 5796 - DNA, 20 bp, Unknown
  Description of Unknown: gRNA target site sequence
cctacggtcccaaggtcagg

SEQ ID NO: 5797 - DNA, 20 bp, Unknown
  Description of Unknown: gRNA target site sequence
ctacggtcccaaggtcagga

SEQ ID NO: 5798 - DNA, 20 bp, Unknown
  Description of Unknown: gRNA target site sequence
cggtcccaaggtcaggaggg

SEQ ID NO: 5799 - DNA, 20 bp, Unknown
  Description of Unknown: gRNA target site sequence
ggtcccaaggtcaggagggc

SEQ ID NO: 5800 - DNA, 20 bp, Unknown
  Description of Unknown: gRNA target site sequence
gtcccaaggtcaggagggca

SEQ ID NO: 5801 - DNA, 20 bp, Unknown
  Description of Unknown: gRNA target site sequence
caaggtcaggagggcagggc

SEQ ID NO: 5802 - DNA, 20 bp, Unknown
  Description of Unknown: gRNA target site sequence
aaggtcaggagggcagggct

SEQ ID NO: 5803 - DNA, 20 bp, Unknown
  Description of Unknown: gRNA target site sequence
aggtcaggagggcagggctg

SEQ ID NO: 5804 - DNA, 20 bp, Unknown
  Description of Unknown: gRNA target site sequence
gggcagggctggggttgact

SEQ ID NO: 5805 - DNA, 20 bp, Unknown
  Description of Unknown: gRNA target site sequence
ggcagggctggggttgactc

SEQ ID NO: 5806 - DNA, 20 bp, Unknown
  Description of Unknown: gRNA target site sequence
gggttgactcaggcccctcc

SEQ ID NO: 5807 - DNA, 20 bp, Unknown
  Description of Unknown: gRNA target site sequence
actcaggcccctcccagctg

SEQ ID NO: 5808 - DNA, 20 bp, Unknown
  Description of Unknown: gRNA target site sequence
ccctcccagctgtggccacc

SEQ ID NO: 5809 - DNA, 20 bp, Unknown
  Description of Unknown: gRNA target site sequence
cctcccagctgtggccacct

SEQ ID NO: 5810 - DNA, 20 bp, Unknown
  Description of Unknown: gRNA target site sequence
agctgtggccacctgggtgt

SEQ ID NO: 5811 - DNA, 20 bp, Unknown
  Description of Unknown: gRNA target site sequence
gctgtggccacctgggtgtt

SEQ ID NO: 5812 - DNA, 20 bp, Unknown
  Description of Unknown: gRNA target site sequence
tgtggccacctgggtgttgg

SEQ ID NO: 5813 - DNA, 20 bp, Unknown
  Description of Unknown: gRNA target site sequence
gtggccacctgggtgttggg

SEQ ID NO: 5814 - DNA, 20 bp, Unknown
  Description of Unknown: gRNA target site sequence
tggccacctgggtgttggga

SEQ ID NO: 5815 - DNA, 20 bp, Unknown
  Description of Unknown: gRNA target site sequence
ccacctgggtgttgggaggg

SEQ ID NO: 5816 - DNA, 20 bp, Unknown
  Description of Unknown: gRNA target site sequence
cctgggtgttgggagggcag

SEQ ID NO: 5817 - DNA, 20 bp, Unknown
  Description of Unknown: gRNA target site sequence
gtgttgggagggcagaagtg

SEQ ID NO: 5818 - DNA, 20 bp, Unknown
  Description of Unknown: gRNA target site sequence
tgttgggagggcagaagtgc

SEQ ID NO: 5819 - DNA, 20 bp, Unknown
  Description of Unknown: gRNA target site sequence
agggcagaagtgcaggcacc

SEQ ID NO: 5820 - DNA, 20 bp, Unknown
  Description of Unknown: gRNA target site sequence
gggcagaagtgcaggcacct

SEQ ID NO: 5821 - DNA, 20 bp, Unknown
  Description of Unknown: gRNA target site sequence
ggcagaagtgcaggcaccta

SEQ ID NO: 5822 - DNA, 20 bp, Unknown
  Description of Unknown: gRNA target site sequence
ggccccccatgtgcccaccc

SEQ ID NO: 5823 - DNA, 20 bp, Unknown
  Description of Unknown: gRNA target site sequence
gccccccatgtgcccaccct

SEQ ID NO: 5824 - DNA, 20 bp, Unknown
  Description of Unknown: gRNA target site sequence
cccccatgtgcccaccctgg

SEQ ID NO: 5825 - DNA, 20 bp, Unknown
  Description of Unknown: gRNA target site sequence
cccaccctgggagctctcct

SEQ ID NO: 5826 - DNA, 20 bp, Unknown
  Description of Unknown: gRNA target site sequence
cccattcctgaaattattta

SEQ ID NO: 5827 - DNA, 20 bp, Unknown
  Description of Unknown: gRNA target site sequence
ccattcctgaaattatttaa

SEQ ID NO: 5828 - DNA, 20 bp, Unknown
  Description of Unknown: gRNA target site sequence
cattcctgaaattatttaaa

SEQ ID NO: 5829 - DNA, 20 bp, Unknown
  Description of Unknown: gRNA target site sequence
attcctgaaattatttaaag

SEQ ID NO: 5830 - DNA, 20 bp, Unknown
  Description of Unknown: gRNA target site sequence
ctgaaattatttaaaggggt

SEQ ID NO: 5831 - DNA, 20 bp, Unknown
  Description of Unknown: gRNA target site sequence
aattatttaaaggggttggc

SEQ ID NO: 5832 - DNA, 20 bp, Unknown
  Description of Unknown: gRNA target site sequence
attatttaaaggggttggcc

SEQ ID NO: 5833 - DNA, 20 bp, Unknown
  Description of Unknown: gRNA target site sequence
ggggttggccgggctcccac

SEQ ID NO: 5834 - DNA, 20 bp, Unknown
  Description of Unknown: gRNA target site sequence
gggttggccgggctcccacc

SEQ ID NO: 5835 - DNA, 20 bp, Unknown
  Description of Unknown: gRNA target site sequence
ggttggccgggctcccacca

SEQ ID NO: 5836 - DNA, 20 bp, Unknown
  Description of Unknown: gRNA target site sequence
gccgggctcccaccagggcc

SEQ ID NO: 5837 - DNA, 20 bp, Unknown
  Description of Unknown: gRNA target site sequence
ccgggctcccaccagggcct

SEQ ID NO: 5838 - DNA, 20 bp, Unknown
  Description of Unknown: gRNA target site sequence
ggctcccaccagggcctggg

SEQ ID NO: 5839 - DNA, 20 bp, Unknown
  Description of Unknown: gRNA target site sequence
gctcccaccagggcctgggt

SEQ ID NO: 5840 - DNA, 20 bp, Unknown
  Description of Unknown: gRNA target site sequence
cccaccagggcctgggtggg

SEQ ID NO: 5841 - DNA, 20 bp, Unknown
  Description of Unknown: gRNA target site sequence
ccaccagggcctgggtggga

SEQ ID NO: 5842 - DNA, 20 bp, Unknown
  Description of Unknown: gRNA target site sequence
agggcctgggtgggaaggta

SEQ ID NO: 5843 - DNA, 20 bp, Unknown
  Description of Unknown: gRNA target site sequence
gggcctgggtgggaaggtac

SEQ ID NO: 5844 - DNA, 20 bp, Unknown
  Description of Unknown: gRNA target site sequence
ggaaggtacaggcgttcccc

SEQ ID NO: 5845 - DNA, 20 bp, Unknown
  Description of Unknown: gRNA target site sequence
gaaggtacaggcgttccccc

SEQ ID NO: 5846 - DNA, 20 bp, Unknown
  Description of Unknown: gRNA target site sequence
aaggtacaggcgttcccccg

SEQ ID NO: 5847 - DNA, 20 bp, Unknown
  Description of Unknown: gRNA target site sequence
acaggcgttcccccggggcc

SEQ ID NO: 5848 - DNA, 20 bp, Unknown
  Description of Unknown: gRNA target site sequence
ggggcctagtacccccgccg

SEQ ID NO: 5849 - DNA, 20 bp, Unknown
  Description of Unknown: gRNA target site sequence
acacactgcacccccactcc

SEQ ID NO: 5850 - DNA, 20 bp, Unknown
  Description of Unknown: gRNA target site sequence
cacactgcacccccactcct

SEQ ID NO: 5851 - DNA, 20 bp, Unknown
  Description of Unknown: gRNA target site sequence
acactgcacccccactcctg

SEQ ID NO: 5852 - DNA, 20 bp, Unknown
  Description of Unknown: gRNA target site sequence
ctgcacccccactcctgggg

SEQ ID NO: 5853 - DNA, 20 bp, Unknown
  Description of Unknown: gRNA target site sequence
tgcacccccactcctggggc

SEQ ID NO: 5854 - DNA, 20 bp, Unknown
  Description of Unknown: gRNA target site sequence
gcacccccactcctggggca

SEQ ID NO: 5855 - DNA, 20 bp, Unknown
  Description of Unknown: gRNA target site sequence
cactcctggggcagggccac

SEQ ID NO: 5856 - DNA, 20 bp, Unknown
  Description of Unknown: gRNA target site sequence
ggggcagggccaccagcatc

SEQ ID NO: 5857 - DNA, 20 bp, Unknown
  Description of Unknown: gRNA target site sequence
gggcagggccaccagcatcc

SEQ ID NO: 5858 - DNA, 20 bp, Unknown
  Description of Unknown: gRNA target site sequence
cagggccaccagcatccagg

SEQ ID NO: 5859 - DNA, 20 bp, Unknown
  Description of Unknown: gRNA target site sequence
gccaccagcatccaggcggc

SEQ ID NO: 5860 - DNA, 20 bp, Unknown
  Description of Unknown: gRNA target site sequence
accagcatccaggcggccag

SEQ ID NO: 5861 - DNA, 20 bp, Unknown
  Description of Unknown: gRNA target site sequence
ccagcatccaggcggccagc

SEQ ID NO: 5862 - DNA, 20 bp, Unknown
  Description of Unknown: gRNA target site sequence
caggcggccagcaggcacct

SEQ ID NO: 5863 - DNA, 20 bp, Unknown
  Description of Unknown: gRNA target site sequence
gcggccagcaggcacctgag

SEQ ID NO: 5864 - DNA, 20 bp, Unknown
  Description of Unknown: gRNA target site sequence
ccagcaggcacctgagtggc

SEQ ID NO: 5865 - DNA, 20 bp, Unknown
  Description of Unknown: gRNA target site sequence
cagcaggcacctgagtggct

SEQ ID NO: 5866 - DNA, 20 bp, Unknown
  Description of Unknown: gRNA target site sequence
ggcacctgagtggctgggac

SEQ ID NO: 5867 - DNA, 20 bp, Unknown
  Description of Unknown: gRNA target site sequence
gcacctgagtggctgggaca

SEQ ID NO: 5868 - DNA, 20 bp, Unknown
  Description of Unknown: gRNA target site sequence
cacctgagtggctgggacaa

SEQ ID NO: 5869 - DNA, 20 bp, Unknown
  Description of Unknown: gRNA target site sequence
caagggatcccccttccctg

SEQ ID NO: 5870 - DNA, 20 bp, Unknown
  Description of Unknown: gRNA target site sequence
ttataattataattaaatat

SEQ ID NO: 5871 - DNA, 20 bp, Unknown
  Description of Unknown: gRNA target site sequence
ataattataattaaatatga

SEQ ID NO: 5872 - DNA, 20 bp, Unknown
  Description of Unknown: gRNA target site sequence
attaaatatgagagcatgct

SEQ ID NO: 5873 - DNA, 20 bp, Unknown
  Description of Unknown: gRNA target site sequence
ttaaatatgagagcatgcta

SEQ ID NO: 5874 - DNA, 20 bp, Unknown
  Description of Unknown: gRNA target site sequence
aaatatgagagcatgctaag

SEQ ID NO: 5875 - DNA, 20 bp, Unknown
  Description of Unknown: gRNA target site sequence
ctaaggagttctgtcctgtc

SEQ ID NO: 5876 - DNA, 20 bp, Unknown
  Description of Unknown: gRNA target site sequence
aggagttctgtcctgtctgg

SEQ ID NO: 5877 - DNA, 20 bp, Unknown
  Description of Unknown: gRNA target site sequence
tctgtcctgtctggtggctg

SEQ ID NO: 5878 - DNA, 20 bp, Unknown
  Description of Unknown: gRNA target site sequence
ctgtcctgtctggtggctgt

SEQ ID NO: 5879 - DNA, 20 bp, Unknown
  Description of Unknown: gRNA target site sequence
tgtcctgtctggtggctgtg

SEQ ID NO: 5880 - DNA, 20 bp, Unknown
  Description of Unknown: gRNA target site sequence
gtcctgtctggtggctgtgg

SEQ ID NO: 5881 - DNA, 20 bp, Unknown
  Description of Unknown: gRNA target site sequence
ctgtctggtggctgtggggg

SEQ ID NO: 5882 - DNA, 20 bp, Unknown
  Description of Unknown: gRNA target site sequence
tctggtggctgtgggggcag

SEQ ID NO: 5883 - DNA, 20 bp, Unknown
  Description of Unknown: gRNA target site sequence
ctggtggctgtgggggcagt

SEQ ID NO: 5884 - DNA, 20 bp, Unknown
  Description of Unknown: gRNA target site sequence
gtggctgtgggggcagtggg

SEQ ID NO: 5885 - DNA, 20 bp, Unknown
  Description of Unknown: gRNA target site sequence
tggctgtgggggcagtgggc

SEQ ID NO: 5886 - DNA, 20 bp, Unknown
  Description of Unknown: gRNA target site sequence
gctgtgggggcagtgggcag

SEQ ID NO: 5887 - DNA, 20 bp, Unknown
  Description of Unknown: gRNA target site sequence
ctgtgggggcagtgggcagg

SEQ ID NO: 5888 - DNA, 20 bp, Unknown
  Description of Unknown: gRNA target site sequence
tgtgggggcagtgggcagga

SEQ ID NO: 5889 - DNA, 20 bp, Unknown
  Description of Unknown: gRNA target site sequence
tgggggcagtgggcaggagg

SEQ ID NO: 5890 - DNA, 20 bp, Unknown
  Description of Unknown: gRNA target site sequence
gggggcagtgggcaggaggg

SEQ ID NO: 5891 - DNA, 20 bp, Unknown
  Description of Unknown: gRNA target site sequence
ggggcagtgggcaggaggga

SEQ ID NO: 5892 - DNA, 20 bp, Unknown
  Description of Unknown: gRNA target site sequence
ggcagtgggcaggagggagg

SEQ ID NO: 5893 - DNA, 20 bp, Unknown
  Description of Unknown: gRNA target site sequence
gcagtgggcaggagggaggg

SEQ ID NO: 5894 - DNA, 20 bp, Unknown
  Description of Unknown: gRNA target site sequence
gcaggagggagggaggcctc

SEQ ID NO: 5895 - DNA, 20 bp, Unknown
  Description of Unknown: gRNA target site sequence
caggagggagggaggcctcc

SEQ ID NO: 5896 - DNA, 20 bp, Unknown
  Description of Unknown: gRNA target site sequence
aggagggagggaggcctcca

SEQ ID NO: 5897 - DNA, 20 bp, Unknown
  Description of Unknown: gRNA target site sequence
gagggagggaggcctccagg

SEQ ID NO: 5898 - DNA, 20 bp, Unknown
  Description of Unknown: gRNA target site sequence
agggagggaggcctccaggg

SEQ ID NO: 5899 - DNA, 20 bp, Unknown
  Description of Unknown: gRNA target site sequence
gggagggaggcctccaggga

SEQ ID NO: 5900 - DNA, 20 bp, Unknown
  Description of Unknown: gRNA target site sequence
ggaggcctccagggagggac

SEQ ID NO: 5901 - DNA, 20 bp, Unknown
  Description of Unknown: gRNA target site sequence
gaggcctccagggagggaca

SEQ ID NO: 5902 - DNA, 20 bp, Unknown
  Description of Unknown: gRNA target site sequence
gcctccagggagggacaagg

SEQ ID NO: 5903 - DNA, 20 bp, Unknown
  Description of Unknown: gRNA target site sequence
tccagggagggacaaggcgg

SEQ ID NO: 5904 - DNA, 20 bp, Unknown
  Description of Unknown: gRNA target site sequence
gggagggacaaggcggcagc

SEQ ID NO: 5905 - DNA, 20 bp, Unknown
  Description of Unknown: gRNA target site sequence
ggagggacaaggcggcagcc

SEQ ID NO: 5906 - DNA, 20 bp, Unknown
  Description of Unknown: gRNA target site sequence
gacaaggcggcagccaggct

SEQ ID NO: 5907 - DNA, 20 bp, Unknown
  Description of Unknown: gRNA target site sequence
acaaggcggcagccaggctg

SEQ ID NO: 5908 - DNA, 20 bp, Unknown
  Description of Unknown: gRNA target site sequence
agccaggctgaggctgtgtg

SEQ ID NO: 5909 - DNA, 20 bp, Unknown
  Description of Unknown: gRNA target site sequence
ccaggctgaggctgtgtgtg

SEQ ID NO: 5910 - DNA, 20 bp, Unknown
  Description of Unknown: gRNA target site sequence
caggctgaggctgtgtgtgg

SEQ ID NO: 5911 - DNA, 20 bp, Unknown
  Description of Unknown: gRNA target site sequence
aggctgaggctgtgtgtgga

SEQ ID NO: 5912 - DNA, 20 bp, Unknown
  Description of Unknown: gRNA target site sequence
aggctgtgtgtggagggtgc

SEQ ID NO: 5913 - DNA, 20 bp, Unknown
  Description of Unknown: gRNA target site sequence
ctgtgtgtggagggtgctgg

SEQ ID NO: 5914 - DNA, 20 bp, Unknown
  Description of Unknown: gRNA target site sequence
gagggtgctggtggctcccc

SEQ ID NO: 5915 - DNA, 20 bp, Unknown
  Description of Unknown: gRNA target site sequence
ctggtggctcccctggatcc

SEQ ID NO: 5916 - DNA, 20 bp, Unknown
  Description of Unknown: gRNA target site sequence
gctcccctggatcctggcct

SEQ ID NO: 5917 - DNA, 20 bp, Unknown
  Description of Unknown: gRNA target site sequence
ccctggatcctggcctgagt

SEQ ID NO: 5918 - DNA, 20 bp, Unknown
  Description of Unknown: gRNA target site sequence
cctggatcctggcctgagtc

SEQ ID NO: 5919 - DNA, 20 bp, Unknown
  Description of Unknown: gRNA target site sequence
aggccttcccctcgctgtcc

SEQ ID NO: 5920 - DNA, 20 bp, Unknown
  Description of Unknown: gRNA target site sequence
ctcgctgtcccagaaacaca

SEQ ID NO: 5921 - DNA, 20 bp, Unknown
  Description of Unknown: gRNA target site sequence
tcgctgtcccagaaacacac

SEQ ID NO: 5922 - DNA, 20 bp, Unknown
  Description of Unknown: gRNA target site sequence
ctgtttgccccactcacatg

SEQ ID NO: 5923 - DNA, 20 bp, Unknown
  Description of Unknown: gRNA target site sequence
gtttgccccactcacatgta

SEQ ID NO: 5924 - DNA, 20 bp, Unknown
  Description of Unknown: gRNA target site sequence
cactcacatgtagagccctc

SEQ ID NO: 5925 - DNA, 20 bp, Unknown
  Description of Unknown: gRNA target site sequence
gaaaaattcctccaacatca

SEQ ID NO: 5926 - DNA, 20 bp, Unknown
  Description of Unknown: gRNA target site sequence
aaaaattcctccaacatcac

SEQ ID NO: 5927 - DNA, 20 bp, Unknown
  Description of Unknown: gRNA target site sequence
aaaattcctccaacatcacg

SEQ ID NO: 5928 - DNA, 20 bp, Unknown
  Description of Unknown: gRNA target site sequence
ttcctccaacatcacggggc

SEQ ID NO: 5929 - DNA, 20 bp, Unknown
  Description of Unknown: gRNA target site sequence
tcctccaacatcacggggct

SEQ ID NO: 5930 - DNA, 20 bp, Unknown
  Description of Unknown: gRNA target site sequence
cctccaacatcacggggctg

SEQ ID NO: 5931 - DNA, 20 bp, Unknown
  Description of Unknown: gRNA target site sequence
ctggggacaccatcttcccc

SEQ ID NO: 5932 - DNA, 20 bp, Unknown
  Description of Unknown: gRNA target site sequence
gacaccatcttccccaagcc

SEQ ID NO: 5933 - DNA, 20 bp, Unknown
  Description of Unknown: gRNA target site sequence
acaccatcttccccaagccc

SEQ ID NO: 5934 - DNA, 20 bp, Unknown
  Description of Unknown: gRNA target site sequence
ttccccaagcccaggccttt

SEQ ID NO: 5935 - DNA, 20 bp, Unknown
  Description of Unknown: gRNA target site sequence
tccccaagcccaggcctttt

SEQ ID NO: 5936 - DNA, 20 bp, Unknown
  Description of Unknown: gRNA target site sequence
ccccaagcccaggcctttta

SEQ ID NO: 5937 - DNA, 20 bp, Unknown
  Description of Unknown: gRNA target site sequence
cccaagcccaggccttttag

SEQ ID NO: 5938 - DNA, 20 bp, Unknown
  Description of Unknown: gRNA target site sequence
ccaagcccaggccttttagg

SEQ ID NO: 5939 - DNA, 20 bp, Unknown
  Description of Unknown: gRNA target site sequence
caagcccaggccttttaggg

SEQ ID NO: 5940 - DNA, 20 bp, Unknown
  Description of Unknown: gRNA target site sequence
ggccttttaggggggtccca

SEQ ID NO: 5941 - DNA, 20 bp, Unknown
  Description of Unknown: gRNA target site sequence
aggggggtcccacggccccc

SEQ ID NO: 5942 - DNA, 20 bp, Unknown
  Description of Unknown: gRNA target site sequence
gtcccacggccccctggccc

SEQ ID NO: 5943 - DNA, 20 bp, Unknown
  Description of Unknown: gRNA target site sequence
tcccacggccccctggcccc

SEQ ID NO: 5944 - DNA, 20 bp, Unknown
  Description of Unknown: gRNA target site sequence
ccccctggccccaggcttcc

SEQ ID NO: 5945 - DNA, 20 bp, Unknown
  Description of Unknown: gRNA target site sequence
ctggccccaggcttcctggc

SEQ ID NO: 5946 - DNA, 20 bp, Unknown
  Description of Unknown: gRNA target site sequence
tggccccaggcttcctggcc

SEQ ID NO: 5947 - DNA, 20 bp, Unknown
  Description of Unknown: gRNA target site sequence
ccaggcttcctggccaggca

SEQ ID NO: 5948 - DNA, 20 bp, Unknown
  Description of Unknown: gRNA target site sequence
caggcttcctggccaggcat

SEQ ID NO: 5949 - DNA, 20 bp, Unknown
  Description of Unknown: gRNA target site sequence
ggccaggcatgggtgtccct

SEQ ID NO: 5950 - DNA, 20 bp, Unknown
  Description of Unknown: gRNA target site sequence
gagtgactgtgcctgctcca

SEQ ID NO: 5951 - DNA, 20 bp, Unknown
  Description of Unknown: gRNA target site sequence
ccccgtgtccccatgcctac

SEQ ID NO: 5952 - DNA, 20 bp, Unknown
  Description of Unknown: gRNA target site sequence
cccatgcctaccagtccctc

SEQ ID NO: 5953 - DNA, 20 bp, Unknown
  Description of Unknown: gRNA target site sequence
ccatgcctaccagtccctcc

SEQ ID NO: 5954 - DNA, 20 bp, Unknown
  Description of Unknown: gRNA target site sequence
tgcctaccagtccctccggg

SEQ ID NO: 5955 - DNA, 20 bp, Unknown
  Description of Unknown: gRNA target site sequence
gcctaccagtccctccgggc

SEQ ID NO: 5956 - DNA, 20 bp, Unknown
  Description of Unknown: gRNA target site sequence
cctaccagtccctccgggca

SEQ ID NO: 5957 - DNA, 20 bp, Unknown
  Description of Unknown: gRNA target site sequence
ctaccagtccctccgggcag

SEQ ID NO: 5958 - DNA, 20 bp, Unknown
  Description of Unknown: gRNA target site sequence
ccagtccctccgggcagggg

SEQ ID NO: 5959 - DNA, 20 bp, Unknown
  Description of Unknown: gRNA target site sequence
caggtaccacccctgcccgg

SEQ ID NO: 5960 - DNA, 20 bp, Unknown
  Description of Unknown: gRNA target site sequence
aggtaccacccctgcccgga

SEQ ID NO: 5961 - DNA, 20 bp, Unknown
  Description of Unknown: gRNA target site sequence
ccacccctgcccggagggac

SEQ ID NO: 5962 - DNA, 20 bp, Unknown
  Description of Unknown: gRNA target site sequence
cccctgcccggagggactgg

SEQ ID NO: 5963 - DNA, 20 bp, Unknown
  Description of Unknown: gRNA target site sequence
ccctgcccggagggactggt

SEQ ID NO: 5964 - DNA, 20 bp, Unknown
  Description of Unknown: gRNA target site sequence
cccggagggactggtaggca

SEQ ID NO: 5965 - DNA, 20 bp, Unknown
  Description of Unknown: gRNA target site sequence
ccggagggactggtaggcat

SEQ ID NO: 5966 - DNA, 20 bp, Unknown
  Description of Unknown: gRNA target site sequence
cggagggactggtaggcatg

SEQ ID NO: 5967 - DNA, 20 bp, Unknown
  Description of Unknown: gRNA target site sequence
gactggtaggcatggggaca

SEQ ID NO: 5968 - DNA, 20 bp, Unknown
  Description of Unknown: gRNA target site sequence
actggtaggcatggggacac

SEQ ID NO: 5969 - DNA, 20 bp, Unknown
  Description of Unknown: gRNA target site sequence
ctggtaggcatggggacacg

SEQ ID NO: 5970 - DNA, 20 bp, Unknown
  Description of Unknown: gRNA target site sequence
tggtaggcatggggacacgg

SEQ ID NO: 5971 - DNA, 20 bp, Unknown
  Description of Unknown: gRNA target site sequence
gcatggggacacgggggcta

SEQ ID NO: 5972 - DNA, 20 bp, Unknown
  Description of Unknown: gRNA target site sequence
atggggacacgggggctatg

SEQ ID NO: 5973 - DNA, 20 bp, Unknown
  Description of Unknown: gRNA target site sequence
gggacacgggggctatggag

SEQ ID NO: 5974 - DNA, 20 bp, Unknown
  Description of Unknown: gRNA target site sequence
ggacacgggggctatggagc

SEQ ID NO: 5975 - DNA, 20 bp, Unknown
  Description of Unknown: gRNA target site sequence
cgggggctatggagcaggca

SEQ ID NO: 5976 - DNA, 20 bp, Unknown
  Description of Unknown: gRNA target site sequence
atggagcaggcacagtcact

SEQ ID NO: 5977 - DNA, 20 bp, Unknown
  Description of Unknown: gRNA target site sequence
tggagcaggcacagtcactc

SEQ ID NO: 5978 - DNA, 20 bp, Unknown
  Description of Unknown: gRNA target site sequence
ggagcaggcacagtcactca

SEQ ID NO: 5979 - DNA, 20 bp, Unknown
  Description of Unknown: gRNA target site sequence
cactcagggacacccatgcc

SEQ ID NO: 5980 - DNA, 20 bp, Unknown
  Description of Unknown: gRNA target site sequence
cagggacacccatgcctggc

SEQ ID NO: 5981 - DNA, 20 bp, Unknown
  Description of Unknown: gRNA target site sequence
agggacacccatgcctggcc

SEQ ID NO: 5982 - DNA, 20 bp, Unknown
  Description of Unknown: gRNA target site sequence
gacacccatgcctggccagg

SEQ ID NO: 5983 - DNA, 20 bp, Unknown
  Description of Unknown: gRNA target site sequence
ccatgcctggccaggaagcc

SEQ ID NO: 5984 - DNA, 20 bp, Unknown
  Description of Unknown: gRNA target site sequence
catgcctggccaggaagcct

SEQ ID NO: 5985 - DNA, 20 bp, Unknown
  Description of Unknown: gRNA target site sequence
atgcctggccaggaagcctg

SEQ ID NO: 5986 - DNA, 20 bp, Unknown
  Description of Unknown: gRNA target site sequence
ctggccaggaagcctggggc

SEQ ID NO: 5987 - DNA, 20 bp, Unknown
  Description of Unknown: gRNA target site sequence
tggccaggaagcctggggcc

SEQ ID NO: 5988 - DNA, 20 bp, Unknown
  Description of Unknown: gRNA target site sequence
ggccaggaagcctggggcca

SEQ ID NO: 5989 - DNA, 20 bp, Unknown
  Description of Unknown: gRNA target site sequence
gccaggaagcctggggccag

SEQ ID NO: 5990 - DNA, 20 bp, Unknown
  Description of Unknown: gRNA target site sequence
ccaggaagcctggggccagg

SEQ ID NO: 5991 - DNA, 20 bp, Unknown
  Description of Unknown: gRNA target site sequence
agcctggggccagggggccg

SEQ ID NO: 5992 - DNA, 20 bp, Unknown
  Description of Unknown: gRNA target site sequence
gcctggggccagggggccgt

SEQ ID NO: 5993 - DNA, 20 bp, Unknown
  Description of Unknown: gRNA target site sequence
gggccgtgggacccccctaa

SEQ ID NO: 5994 - DNA, 20 bp, Unknown
  Description of Unknown: gRNA target site sequence
ggccgtgggacccccctaaa

SEQ ID NO: 5995 - DNA, 20 bp, Unknown
  Description of Unknown: gRNA target site sequence
tgggacccccctaaaaggcc

SEQ ID NO: 5996 - DNA, 20 bp, Unknown
  Description of Unknown: gRNA target site sequence
gggacccccctaaaaggcct

SEQ ID NO: 5997 - DNA, 20 bp, Unknown
  Description of Unknown: gRNA target site sequence
ccccctaaaaggcctgggct

SEQ ID NO: 5998 - DNA, 20 bp, Unknown
  Description of Unknown: gRNA target site sequence
cccctaaaaggcctgggctt

SEQ ID NO: 5999 - DNA, 20 bp, Unknown
  Description of Unknown: gRNA target site sequence
ccctaaaaggcctgggcttg

SEQ ID NO: 6000 - DNA, 20 bp, Unknown
  Description of Unknown: gRNA target site sequence
taaaaggcctgggcttgggg

SEQ ID NO: 6001 - DNA, 20 bp, Unknown
  Description of Unknown: gRNA target site sequence
aggcctgggcttggggaaga

SEQ ID NO: 6002 - DNA, 20 bp, Unknown
  Description of Unknown: gRNA target site sequence
cttggggaagatggtgtccc

SEQ ID NO: 6003 - DNA, 20 bp, Unknown
  Description of Unknown: gRNA target site sequence
tgtccccagccccgtgatgt

SEQ ID NO: 6004 - DNA, 20 bp, Unknown
  Description of Unknown: gRNA target site sequence
tccccagccccgtgatgttg

SEQ ID NO: 6005 - DNA, 20 bp, Unknown
  Description of Unknown: gRNA target site sequence
ccccagccccgtgatgttgg

SEQ ID NO: 6006 - DNA, 20 bp, Unknown
  Description of Unknown: gRNA target site sequence
atgttggaggaatttttcac

SEQ ID NO: 6007 - DNA, 20 bp, Unknown
  Description of Unknown: gRNA target site sequence
gttggaggaatttttcaccg

SEQ ID NO: 6008 - DNA, 20 bp, Unknown
  Description of Unknown: gRNA target site sequence
ttggaggaatttttcaccgg

SEQ ID NO: 6009 - DNA, 20 bp, Unknown
  Description of Unknown: gRNA target site sequence
tggaggaatttttcaccgga

SEQ ID NO: 6010 - DNA, 20 bp, Unknown
  Description of Unknown: gRNA target site sequence
caccggagggctctacatgt

SEQ ID NO: 6011 - DNA, 20 bp, Unknown
  Description of Unknown: gRNA target site sequence
cggagggctctacatgtgag

SEQ ID NO: 6012 - DNA, 20 bp, Unknown
  Description of Unknown: gRNA target site sequence
ggagggctctacatgtgagt

SEQ ID NO: 6013 - DNA, 20 bp, Unknown
  Description of Unknown: gRNA target site sequence
gagggctctacatgtgagtg

SEQ ID NO: 6014 - DNA, 20 bp, Unknown
  Description of Unknown: gRNA target site sequence
ctacatgtgagtggggcaaa

SEQ ID NO: 6015 - DNA, 20 bp, Unknown
  Description of Unknown: gRNA target site sequence
tacatgtgagtggggcaaac

SEQ ID NO: 6016 - DNA, 20 bp, Unknown
  Description of Unknown: gRNA target site sequence
acatgtgagtggggcaaaca

SEQ ID NO: 6017 - DNA, 20 bp, Unknown
  Description of Unknown: gRNA target site sequence
gtgagtggggcaaacagggc

SEQ ID NO: 6018 - DNA, 20 bp, Unknown
  Description of Unknown: gRNA target site sequence
tgagtggggcaaacagggcg

SEQ ID NO: 6019 - DNA, 20 bp, Unknown
  Description of Unknown: gRNA target site sequence
agtggggcaaacagggcgag

SEQ ID NO: 6020 - DNA, 20 bp, Unknown
  Description of Unknown: gRNA target site sequence
gtggggcaaacagggcgagg

SEQ ID NO: 6021 - DNA, 20 bp, Unknown
  Description of Unknown: gRNA target site sequence
tggggcaaacagggcgagga

SEQ ID NO: 6022 - DNA, 20 bp, Unknown
  Description of Unknown: gRNA target site sequence
gaggagggcctgtgtgtttc

SEQ ID NO: 6023 - DNA, 20 bp, Unknown
  Description of Unknown: gRNA target site sequence
aggagggcctgtgtgtttct

SEQ ID NO: 6024 - DNA, 20 bp, Unknown
  Description of Unknown: gRNA target site sequence
gggcctgtgtgtttctggga

SEQ ID NO: 6025 - DNA, 20 bp, Unknown
  Description of Unknown: gRNA target site sequence
ctgtgtgtttctgggacagc

SEQ ID NO: 6026 - DNA, 20 bp, Unknown
  Description of Unknown: gRNA target site sequence
tgtgtgtttctgggacagcg

SEQ ID NO: 6027 - DNA, 20 bp, Unknown
  Description of Unknown: gRNA target site sequence
gtgtgtttctgggacagcga

SEQ ID NO: 6028 - DNA, 20 bp, Unknown
  Description of Unknown: gRNA target site sequence
tgtgtttctgggacagcgag

SEQ ID NO: 6029 - DNA, 20 bp, Unknown
  Description of Unknown: gRNA target site sequence
gtttctgggacagcgagggg

SEQ ID NO: 6030 - DNA, 20 bp, Unknown
  Description of Unknown: gRNA target site sequence
tttctgggacagcgagggga

SEQ ID NO: 6031 - DNA, 20 bp, Unknown
  Description of Unknown: gRNA target site sequence
agcgaggggaaggcctgact

SEQ ID NO: 6032 - DNA, 20 bp, Unknown
  Description of Unknown: gRNA target site sequence
gcgaggggaaggcctgactc

SEQ ID NO: 6033 - DNA, 20 bp, Unknown
  Description of Unknown: gRNA target site sequence
ggggaaggcctgactcaggc

SEQ ID NO: 6034 - DNA, 20 bp, Unknown
  Description of Unknown: gRNA target site sequence
gggaaggcctgactcaggcc

SEQ ID NO: 6035 - DNA, 20 bp, Unknown
  Description of Unknown: gRNA target site sequence
gcctgactcaggccaggatc

SEQ ID NO: 6036 - DNA, 20 bp, Unknown
  Description of Unknown: gRNA target site sequence
cctgactcaggccaggatcc

SEQ ID NO: 6037 - DNA, 20 bp, Unknown
  Description of Unknown: gRNA target site sequence
ctgactcaggccaggatcca

SEQ ID NO: 6038 - DNA, 20 bp, Unknown
  Description of Unknown: gRNA target site sequence
tgactcaggccaggatccag

SEQ ID NO: 6039 - DNA, 20 bp, Unknown
  Description of Unknown: gRNA target site sequence
actcaggccaggatccaggg

SEQ ID NO: 6040 - DNA, 20 bp, Unknown
  Description of Unknown: gRNA target site sequence
ccaggatccaggggagccac

SEQ ID NO: 6041 - DNA, 20 bp, Unknown
  Description of Unknown: gRNA target site sequence
ccaccagcaccctccacaca

SEQ ID NO: 6042 - DNA, 20 bp, Unknown
  Description of Unknown: gRNA target site sequence
gcaccctccacacacagcct

SEQ ID NO: 6043 - DNA, 20 bp, Unknown
  Description of Unknown: gRNA target site sequence
ctccacacacagcctcagcc

SEQ ID NO: 6044 - DNA, 20 bp, Unknown
  Description of Unknown: gRNA target site sequence
gctgccgccttgtccctccc

SEQ ID NO: 6045 - DNA, 20 bp, Unknown
  Description of Unknown: gRNA target site sequence
tgccgccttgtccctccctg

SEQ ID NO: 6046 - DNA, 20 bp, Unknown
  Description of Unknown: gRNA target site sequence
gccgccttgtccctccctgg

SEQ ID NO: 6047 - DNA, 20 bp, Unknown
  Description of Unknown: gRNA target site sequence
cctcctgcccactgccccca

SEQ ID NO: 6048 - DNA, 20 bp, Unknown
  Description of Unknown: gRNA target site sequence
cccactgcccccacagccac

SEQ ID NO: 6049 - DNA, 20 bp, Unknown
  Description of Unknown: gRNA target site sequence
ctgcccccacagccaccaga

SEQ ID NO: 6050 - DNA, 20 bp, Unknown
  Description of Unknown: gRNA target site sequence
tgcccccacagccaccagac

SEQ ID NO: 6051 - DNA, 20 bp, Unknown
  Description of Unknown: gRNA target site sequence
cccacagccaccagacagga

SEQ ID NO: 6052 - DNA, 20 bp, Unknown
  Description of Unknown: gRNA target site sequence
ccagacaggacagaactcct

SEQ ID NO: 6053 - DNA, 20 bp, Unknown
  Description of Unknown: gRNA target site sequence
taattataattataatataa

SEQ ID NO: 6054 - DNA, 20 bp, Unknown
  Description of Unknown: gRNA target site sequence
attataatataatagaacca

SEQ ID NO: 6055 - DNA, 20 bp, Unknown
  Description of Unknown: gRNA target site sequence
ttataatataatagaaccac

SEQ ID NO: 6056 - DNA, 20 bp, Unknown
  Description of Unknown: gRNA target site sequence
tataatataatagaaccaca

SEQ ID NO: 6057 - DNA, 20 bp, Unknown
  Description of Unknown: gRNA target site sequence
aatataatagaaccacaggg

SEQ ID NO: 6058 - DNA, 20 bp, Unknown
  Description of Unknown: gRNA target site sequence
atataatagaaccacaggga

SEQ ID NO: 6059 - DNA, 20 bp, Unknown
  Description of Unknown: gRNA target site sequence
tataatagaaccacagggaa

SEQ ID NO: 6060 - DNA, 20 bp, Unknown
  Description of Unknown: gRNA target site sequence
ataatagaaccacagggaag

SEQ ID NO: 6061 - DNA, 20 bp, Unknown
  Description of Unknown: gRNA target site sequence
taatagaaccacagggaagg

SEQ ID NO: 6062 - DNA, 20 bp, Unknown
  Description of Unknown: gRNA target site sequence
ggaagggggatcccttgtcc

SEQ ID NO: 6063 - DNA, 20 bp, Unknown
  Description of Unknown: gRNA target site sequence
gatcccttgtcccagccact

SEQ ID NO: 6064 - DNA, 20 bp, Unknown
  Description of Unknown: gRNA target site sequence
atcccttgtcccagccactc

SEQ ID NO: 6065 - DNA, 20 bp, Unknown
  Description of Unknown: gRNA target site sequence
ccagccactcaggtgcctgc

SEQ ID NO: 6066 - DNA, 20 bp, Unknown
  Description of Unknown: gRNA target site sequence
tcaggtgcctgctggccgcc

SEQ ID NO: 6067 - DNA, 20 bp, Unknown
  Description of Unknown: gRNA target site sequence
cctgctggccgcctggatgc

SEQ ID NO: 6068 - DNA, 20 bp, Unknown
  Description of Unknown: gRNA target site sequence
gctggccgcctggatgctgg

SEQ ID NO: 6069 - DNA, 20 bp, Unknown
  Description of Unknown: gRNA target site sequence
ggatgctggtggccctgccc

SEQ ID NO: 6070 - DNA, 20 bp, Unknown
  Description of Unknown: gRNA target site sequence
gatgctggtggccctgcccc

SEQ ID NO: 6071 - DNA, 20 bp, Unknown
  Description of Unknown: gRNA target site sequence
tgctggtggccctgccccag

SEQ ID NO: 6072 - DNA, 20 bp, Unknown
  Description of Unknown: gRNA target site sequence
tggtggccctgccccaggag

SEQ ID NO: 6073 - DNA, 20 bp, Unknown
  Description of Unknown: gRNA target site sequence
ggtggccctgccccaggagt

SEQ ID NO: 6074 - DNA, 20 bp, Unknown
  Description of Unknown: gRNA target site sequence
gtggccctgccccaggagtg

SEQ ID NO: 6075 - DNA, 20 bp, Unknown
  Description of Unknown: gRNA target site sequence
tggccctgccccaggagtgg

SEQ ID NO: 6076 - DNA, 20 bp, Unknown
  Description of Unknown: gRNA target site sequence
ctgccccaggagtgggggtg

SEQ ID NO: 6077 - DNA, 20 bp, Unknown
  Description of Unknown: gRNA target site sequence
aggagtgggggtgcagtgtg

SEQ ID NO: 6078 - DNA, 20 bp, Unknown
  Description of Unknown: gRNA target site sequence
ggggtgcagtgtgtggatgt

SEQ ID NO: 6079 - DNA, 20 bp, Unknown
  Description of Unknown: gRNA target site sequence
gggtgcagtgtgtggatgtg

SEQ ID NO: 6080 - DNA, 20 bp, Unknown
  Description of Unknown: gRNA target site sequence
gtgcagtgtgtggatgtgag

SEQ ID NO: 6081 - DNA, 20 bp, Unknown
  Description of Unknown: gRNA target site sequence
cagtgtgtggatgtgaggag

SEQ ID NO: 6082 - DNA, 20 bp, Unknown
  Description of Unknown: gRNA target site sequence
gtgtggatgtgaggagtgga

SEQ ID NO: 6083 - DNA, 20 bp, Unknown
  Description of Unknown: gRNA target site sequence
tgtggatgtgaggagtggat

SEQ ID NO: 6084 - DNA, 20 bp, Unknown
  Description of Unknown: gRNA target site sequence
tgtgaggagtggataggcca

SEQ ID NO: 6085 - DNA, 20 bp, Unknown
  Description of Unknown: gRNA target site sequence
gaggagtggataggccacgg

SEQ ID NO: 6086 - DNA, 20 bp, Unknown
  Description of Unknown: gRNA target site sequence
aggagtggataggccacggc

SEQ ID NO: 6087 - DNA, 20 bp, Unknown
  Description of Unknown: gRNA target site sequence
ggagtggataggccacggcg

SEQ ID NO: 6088 - DNA, 20 bp, Unknown
  Description of Unknown: gRNA target site sequence
gagtggataggccacggcgg

SEQ ID NO: 6089 - DNA, 20 bp, Unknown
  Description of Unknown: gRNA target site sequence
ataggccacggcgggggtac

SEQ ID NO: 6090 - DNA, 20 bp, Unknown
  Description of Unknown: gRNA target site sequence
taggccacggcgggggtact

SEQ ID NO: 6091 - DNA, 20 bp, Unknown
  Description of Unknown: gRNA target site sequence
acggcgggggtactaggccc

SEQ ID NO: 6092 - DNA, 20 bp, Unknown
  Description of Unknown: gRNA target site sequence
cggcgggggtactaggcccc

SEQ ID NO: 6093 - DNA, 20 bp, Unknown
  Description of Unknown: gRNA target site sequence
ggcgggggtactaggccccg

SEQ ID NO: 6094 - DNA, 20 bp, Unknown
  Description of Unknown: gRNA target site sequence
gcgggggtactaggccccgg

SEQ ID NO: 6095 - DNA, 20 bp, Unknown
  Description of Unknown: gRNA target site sequence
aacgcctgtaccttcccacc

SEQ ID NO: 6096 - DNA, 20 bp, Unknown
  Description of Unknown: gRNA target site sequence
acgcctgtaccttcccaccc

SEQ ID NO: 6097 - DNA, 20 bp, Unknown
  Description of Unknown: gRNA target site sequence
gtaccttcccacccaggccc

SEQ ID NO: 6098 - DNA, 20 bp, Unknown
  Description of Unknown: gRNA target site sequence
ccttcccacccaggccctgg

SEQ ID NO: 6099 - DNA, 20 bp, Unknown
  Description of Unknown: gRNA target site sequence
cttcccacccaggccctggt

SEQ ID NO: 6100 - DNA, 20 bp, Unknown
  Description of Unknown: gRNA target site sequence
tcccacccaggccctggtgg

SEQ ID NO: 6101 - DNA, 20 bp, Unknown
  Description of Unknown: gRNA target site sequence
cccaggccctggtgggagcc

SEQ ID NO: 6102 - DNA, 20 bp, Unknown
  Description of Unknown: gRNA target site sequence
ccaacccctttaaataattt

SEQ ID NO: 6103 - DNA, 20 bp, Unknown
  Description of Unknown: gRNA target site sequence
caacccctttaaataatttc

SEQ ID NO: 6104 - DNA, 20 bp, Unknown
  Description of Unknown: gRNA target site sequence
cctttaaataatttcaggaa

SEQ ID NO: 6105 - DNA, 20 bp, Unknown
  Description of Unknown: gRNA target site sequence
ctttaaataatttcaggaat

SEQ ID NO: 6106 - DNA, 20 bp, Unknown
  Description of Unknown: gRNA target site sequence
taatttcaggaatgggttcc

SEQ ID NO: 6107 - DNA, 20 bp, Unknown
  Description of Unknown: gRNA target site sequence
aatttcaggaatgggttcca

SEQ ID NO: 6108 - DNA, 20 bp, Unknown
  Description of Unknown: gRNA target site sequence
tttcaggaatgggttccaag

SEQ ID NO: 6109 - DNA, 20 bp, Unknown
  Description of Unknown: gRNA target site sequence
tcaggaatgggttccaagga

SEQ ID NO: 6110 - DNA, 20 bp, Unknown
  Description of Unknown: gRNA target site sequence
tgggttccaaggagagctcc

SEQ ID NO: 6111 - DNA, 20 bp, Unknown
  Description of Unknown: gRNA target site sequence
gggttccaaggagagctccc

SEQ ID NO: 6112 - DNA, 20 bp, Unknown
  Description of Unknown: gRNA target site sequence
ggttccaaggagagctccca

SEQ ID NO: 6113 - DNA, 20 bp, Unknown
  Description of Unknown: gRNA target site sequence
tccaaggagagctcccaggg

SEQ ID NO: 6114 - DNA, 20 bp, Unknown
  Description of Unknown: gRNA target site sequence
ccaaggagagctcccagggt

SEQ ID NO: 6115 - DNA, 20 bp, Unknown
  Description of Unknown: gRNA target site sequence
gagctcccagggtgggcaca

SEQ ID NO: 6116 - DNA, 20 bp, Unknown
  Description of Unknown: gRNA target site sequence
agctcccagggtgggcacat

SEQ ID NO: 6117 - DNA, 20 bp, Unknown
  Description of Unknown: gRNA target site sequence
gctcccagggtgggcacatg

SEQ ID NO: 6118 - DNA, 20 bp, Unknown
  Description of Unknown: gRNA target site sequence
ctcccagggtgggcacatgg

SEQ ID NO: 6119 - DNA, 20 bp, Unknown
  Description of Unknown: gRNA target site sequence
tcccagggtgggcacatggg

SEQ ID NO: 6120 - DNA, 20 bp, Unknown
  Description of Unknown: gRNA target site sequence
ggtgggcacatggggggccc

SEQ ID NO: 6121 - DNA, 20 bp, Unknown
  Description of Unknown: gRNA target site sequence
gtgggcacatggggggccct

SEQ ID NO: 6122 - DNA, 20 bp, Unknown
  Description of Unknown: gRNA target site sequence
acttctgccctcccaacacc

SEQ ID NO: 6123 - DNA, 20 bp, Unknown
  Description of Unknown: gRNA target site sequence
cttctgccctcccaacaccc

SEQ ID NO: 6124 - DNA, 20 bp, Unknown
  Description of Unknown: gRNA target site sequence
ctgccctcccaacacccagg

SEQ ID NO: 6125 - DNA, 20 bp, Unknown
  Description of Unknown: gRNA target site sequence
tcccaacacccaggtggcca

SEQ ID NO: 6126 - DNA, 20 bp, Unknown
  Description of Unknown: gRNA target site sequence
aacacccaggtggccacagc

SEQ ID NO: 6127 - DNA, 20 bp, Unknown
  Description of Unknown: gRNA target site sequence
acacccaggtggccacagct

SEQ ID NO: 6128 - DNA, 20 bp, Unknown
  Description of Unknown: gRNA target site sequence
acccaggtggccacagctgg

SEQ ID NO: 6129 - DNA, 20 bp, Unknown
  Description of Unknown: gRNA target site sequence
cccaggtggccacagctggg

SEQ ID NO: 6130 - DNA, 20 bp, Unknown
  Description of Unknown: gRNA target site sequence
ccaggtggccacagctggga

SEQ ID NO: 6131 - DNA, 20 bp, Unknown
  Description of Unknown: gRNA target site sequence
caggtggccacagctgggag

SEQ ID NO: 6132 - DNA, 20 bp, Unknown
  Description of Unknown: gRNA target site sequence
gccacagctgggaggggcct

SEQ ID NO: 6133 - DNA, 20 bp, Unknown
  Description of Unknown: gRNA target site sequence
ggaggggcctgagtcaaccc

SEQ ID NO: 6134 - DNA, 20 bp, Unknown
  Description of Unknown: gRNA target site sequence
cagccctgccctcctgacct

SEQ ID NO: 6135 - DNA, 20 bp, Unknown
  Description of Unknown: gRNA target site sequence
agccctgccctcctgacctt

SEQ ID NO: 6136 - DNA, 20 bp, Unknown
  Description of Unknown: gRNA target site sequence
ccctcctgaccttgggaccg

SEQ ID NO: 6137 - DNA, 20 bp, Unknown
  Description of Unknown: gRNA target site sequence
cctcctgaccttgggaccgt

SEQ ID NO: 6138 - DNA, 20 bp, Unknown
  Description of Unknown: gRNA target site sequence
ccgtaggatgtccctctccc

SEQ ID NO: 6139 - DNA, 20 bp, Unknown
  Description of Unknown: gRNA target site sequence
taggatgtccctctcccgag

SEQ ID NO: 6140 - DNA, 20 bp, Unknown
  Description of Unknown: gRNA target site sequence
gtccctctcccgagtggtgt

SEQ ID NO: 6141 - DNA, 20 bp, Unknown
  Description of Unknown: gRNA target site sequence
tccctctcccgagtggtgtg

SEQ ID NO: 6142 - DNA, 20 bp, Unknown
  Description of Unknown: gRNA target site sequence
ccctctcccgagtggtgtga

SEQ ID NO: 6143 - DNA, 20 bp, Unknown
  Description of Unknown: gRNA target site sequence
cctctcccgagtggtgtgag

SEQ ID NO: 6144 - DNA, 20 bp, Unknown
  Description of Unknown: gRNA target site sequence
tcccgagtggtgtgaggggc

SEQ ID NO: 6145 - DNA, 20 bp, Unknown
  Description of Unknown: gRNA target site sequence
cccgagtggtgtgaggggct

SEQ ID NO: 6146 - DNA, 20 bp, Unknown
  Description of Unknown: gRNA target site sequence
ccgagtggtgtgaggggctg

SEQ ID NO: 6147 - DNA, 20 bp, Unknown
  Description of Unknown: gRNA target site sequence
agtggtgtgaggggctgggg

SEQ ID NO: 6148 - DNA, 20 bp, Unknown
  Description of Unknown: gRNA target site sequence
tgaggggctggggtggaatg

SEQ ID NO: 6149 - DNA, 20 bp, Unknown
  Description of Unknown: gRNA target site sequence
ggggctggggtggaatgcgg

SEQ ID NO: 6150 - DNA, 20 bp, Unknown
  Description of Unknown: gRNA target site sequence
gctggggtggaatgcggcgg

SEQ ID NO: 6151 - DNA, 20 bp, Unknown
  Description of Unknown: gRNA target site sequence
ctggggtggaatgcggcggc

SEQ ID NO: 6152 - DNA, 20 bp, Unknown
  Description of Unknown: gRNA target site sequence
ggggtggaatgcggcggcag

SEQ ID NO: 6153 - DNA, 20 bp, Unknown
  Description of Unknown: gRNA target site sequence
gggtggaatgcggcggcagg

SEQ ID NO: 6154 - DNA, 20 bp, Unknown
  Description of Unknown: gRNA target site sequence
ggaatgcggcggcaggaggc

SEQ ID NO: 6155 - DNA, 20 bp, Unknown
  Description of Unknown: gRNA target site sequence
aatgcggcggcaggaggcca

SEQ ID NO: 6156 - DNA, 20 bp, Unknown
  Description of Unknown: gRNA target site sequence
gcggcaggaggccagagtgc

SEQ ID NO: 6157 - DNA, 20 bp, Unknown
  Description of Unknown: gRNA target site sequence
caggaggccagagtgctggc

SEQ ID NO: 6158 - DNA, 20 bp, Unknown
  Description of Unknown: gRNA target site sequence
aggaggccagagtgctggct

SEQ ID NO: 6159 - DNA, 20 bp, Unknown
  Description of Unknown: gRNA target site sequence
agagtgctggctgggcctga

SEQ ID NO: 6160 - DNA, 20 bp, Unknown
  Description of Unknown: gRNA target site sequence
gagtgctggctgggcctgaa

SEQ ID NO: 6161 - DNA, 20 bp, Unknown
  Description of Unknown: gRNA target site sequence
ggctgggcctgaaaggcctc

SEQ ID NO: 6162 - DNA, 20 bp, Unknown
  Description of Unknown: gRNA target site sequence
tgcctgcccgcttactgcct

SEQ ID NO: 6163 - DNA, 20 bp, Unknown
  Description of Unknown: gRNA target site sequence
ctcagcttccctgccccaca

SEQ ID NO: 6164 - DNA, 20 bp, Unknown
  Description of Unknown: gRNA target site sequence
tcagcttccctgccccacaa

SEQ ID NO: 6165 - DNA, 20 bp, Unknown
  Description of Unknown: gRNA target site sequence
cagcttccctgccccacaaa

SEQ ID NO: 6166 - DNA, 20 bp, Unknown
  Description of Unknown: gRNA target site sequence
ccctgccccacaaagggcct

SEQ ID NO: 6167 - DNA, 20 bp, Unknown
  Description of Unknown: gRNA target site sequence
cctgccccacaaagggcctg

SEQ ID NO: 6168 - DNA, 20 bp, Unknown
  Description of Unknown: gRNA target site sequence
aaagggcctgaggtgctgcc

SEQ ID NO: 6169 - DNA, 20 bp, Unknown
  Description of Unknown: gRNA target site sequence
aagggcctgaggtgctgcct

SEQ ID NO: 6170 - DNA, 20 bp, Unknown
  Description of Unknown: gRNA target site sequence
gtgctgcctgggcatgtgta

SEQ ID NO: 6171 - DNA, 20 bp, Unknown
  Description of Unknown: gRNA target site sequence
tgctgcctgggcatgtgtaa

SEQ ID NO: 6172 - DNA, 20 bp, Unknown
  Description of Unknown: gRNA target site sequence
tgcctgggcatgtgtaaagg

SEQ ID NO: 6173 - DNA, 20 bp, Unknown
  Description of Unknown: gRNA target site sequence
cctgggcatgtgtaaaggtg

SEQ ID NO: 6174 - DNA, 20 bp, Unknown
  Description of Unknown: gRNA target site sequence
ctgggcatgtgtaaaggtgg

SEQ ID NO: 6175 - DNA, 20 bp, Unknown
  Description of Unknown: gRNA target site sequence
tgggcatgtgtaaaggtgga

SEQ ID NO: 6176 - DNA, 20 bp, Unknown
  Description of Unknown: gRNA target site sequence
gggcatgtgtaaaggtggag

SEQ ID NO: 6177 - DNA, 20 bp, Unknown
  Description of Unknown: gRNA target site sequence
gtttcctgccctgcccacca

SEQ ID NO: 6178 - DNA, 20 bp, Unknown
  Description of Unknown: gRNA target site sequence
cctgccctgcccaccacagc

SEQ ID NO: 6179 - DNA, 20 bp, Unknown
  Description of Unknown: gRNA target site sequence
ctgccctgcccaccacagcc

SEQ ID NO: 6180 - DNA, 20 bp, Unknown
  Description of Unknown: gRNA target site sequence
gccctgcccaccacagccag

SEQ ID NO: 6181 - DNA, 20 bp, Unknown
  Description of Unknown: gRNA target site sequence
gaccttccctgaaacttctc

SEQ ID NO: 6182 - DNA, 20 bp, Unknown
  Description of Unknown: gRNA target site sequence
accttccctgaaacttctct

SEQ ID NO: 6183 - DNA, 20 bp, Unknown
  Description of Unknown: gRNA target site sequence
ctgaaacttctctaggcctg

SEQ ID NO: 6184 - DNA, 20 bp, Unknown
  Description of Unknown: gRNA target site sequence
tgaaacttctctaggcctgc

SEQ ID NO: 6185 - DNA, 20 bp, Unknown
  Description of Unknown: gRNA target site sequence
gaaacttctctaggcctgca

SEQ ID NO: 6186 - DNA, 20 bp, Unknown
  Description of Unknown: gRNA target site sequence
aacttctctaggcctgcagg

SEQ ID NO: 6187 - DNA, 20 bp, Unknown
  Description of Unknown: gRNA target site sequence
ttctctaggcctgcagggag

SEQ ID NO: 6188 - DNA, 20 bp, Unknown
  Description of Unknown: gRNA target site sequence
tgcagggagcagataactcc

SEQ ID NO: 6189 - DNA, 20 bp, Unknown
  Description of Unknown: gRNA target site sequence
gcagggagcagataactcct

SEQ ID NO: 6190 - DNA, 20 bp, Unknown
  Description of Unknown: gRNA target site sequence
cagggagcagataactcctg

SEQ ID NO: 6191 - DNA, 20 bp, Unknown
  Description of Unknown: gRNA target site sequence
gggagcagataactcctggg

SEQ ID NO: 6192 - DNA, 20 bp, Unknown
  Description of Unknown: gRNA target site sequence
gataactcctggggagtccc

SEQ ID NO: 6193 - DNA, 20 bp, Unknown
  Description of Unknown: gRNA target site sequence
gtacctcccactcctgtgcc

SEQ ID NO: 6194 - DNA, 20 bp, Unknown
  Description of Unknown: gRNA target site sequence
cccactcctgtgcccagtct

SEQ ID NO: 6195 - DNA, 20 bp, Unknown
  Description of Unknown: gRNA target site sequence
ccactcctgtgcccagtctt

SEQ ID NO: 6196 - DNA, 20 bp, Unknown
  Description of Unknown: gRNA target site sequence
ccagtcttgggccctgcgtc

SEQ ID NO: 6197 - DNA, 20 bp, Unknown
  Description of Unknown: gRNA target site sequence
cagtcttgggccctgcgtcc

SEQ ID NO: 6198 - DNA, 20 bp, Unknown
  Description of Unknown: gRNA target site sequence
agtcttgggccctgcgtcca

SEQ ID NO: 6199 - DNA, 20 bp, Unknown
  Description of Unknown: gRNA target site sequence
gccctgcgtccagggcgttt

SEQ ID NO: 6200 - DNA, 20 bp, Unknown
  Description of Unknown: gRNA target site sequence
ccctgcgtccagggcgtttc

SEQ ID NO: 6201 - DNA, 20 bp, Unknown
  Description of Unknown: gRNA target site sequence
gcgtttcgggatgccactgc

SEQ ID NO: 6202 - DNA, 20 bp, Unknown
  Description of Unknown: gRNA target site sequence
cgtttcgggatgccactgcc

SEQ ID NO: 6203 - DNA, 20 bp, Unknown
  Description of Unknown: gRNA target site sequence
gtttcgggatgccactgcca

SEQ ID NO: 6204 - DNA, 20 bp, Unknown
  Description of Unknown: gRNA target site sequence
tttcgggatgccactgccag

SEQ ID NO: 6205 - DNA, 20 bp, Unknown
  Description of Unknown: gRNA target site sequence
tgccactgccaggggcacct

SEQ ID NO: 6206 - DNA, 20 bp, Unknown
  Description of Unknown: gRNA target site sequence
aggggcaccttggctgctcc

SEQ ID NO: 6207 - DNA, 20 bp, Unknown
  Description of Unknown: gRNA target site sequence
ggggcaccttggctgctcca

SEQ ID NO: 6208 - DNA, 20 bp, Unknown
  Description of Unknown: gRNA target site sequence
gctccaaggccatctccaac

SEQ ID NO: 6209 - DNA, 20 bp, Unknown
  Description of Unknown: gRNA target site sequence
gccatctccaaccagccccc

SEQ ID NO: 6210 - DNA, 20 bp, Unknown
  Description of Unknown: gRNA target site sequence
ctccaaccagcccccaagtt

SEQ ID NO: 6211 - DNA, 20 bp, Unknown
  Description of Unknown: gRNA target site sequence
tccaaccagcccccaagttc

SEQ ID NO: 6212 - DNA, 20 bp, Unknown
  Description of Unknown: gRNA target site sequence
aaccagcccccaagttcagg

SEQ ID NO: 6213 - DNA, 20 bp, Unknown
  Description of Unknown: gRNA target site sequence
accagcccccaagttcaggc

SEQ ID NO: 6214 - DNA, 20 bp, Unknown
  Description of Unknown: gRNA target site sequence
cagcccccaagttcaggcag

SEQ ID NO: 6215 - DNA, 20 bp, Unknown
  Description of Unknown: gRNA target site sequence
agcccccaagttcaggcagg

SEQ ID NO: 6216 - DNA, 20 bp, Unknown
  Description of Unknown: gRNA target site sequence
caagttcaggcaggaggctc

SEQ ID NO: 6217 - DNA, 20 bp, Unknown
  Description of Unknown: gRNA target site sequence
aagttcaggcaggaggctcc

SEQ ID NO: 6218 - DNA, 20 bp, Unknown
  Description of Unknown: gRNA target site sequence
agttcaggcaggaggctccg

SEQ ID NO: 6219 - DNA, 20 bp, Unknown
  Description of Unknown: gRNA target site sequence
ggcaggaggctccggggcgt

SEQ ID NO: 6220 - DNA, 20 bp, Unknown
  Description of Unknown: gRNA target site sequence
gcaggaggctccggggcgtc

SEQ ID NO: 6221 - DNA, 20 bp, Unknown
  Description of Unknown: gRNA target site sequence
ggaggctccggggcgtcagg

SEQ ID NO: 6222 - DNA, 20 bp, Unknown
  Description of Unknown: gRNA target site sequence
gaggctccggggcgtcaggc

SEQ ID NO: 6223 - DNA, 20 bp, Unknown
  Description of Unknown: gRNA target site sequence
aggctccggggcgtcaggca

SEQ ID NO: 6224 - DNA, 20 bp, Unknown
  Description of Unknown: gRNA target site sequence
cggggcgtcaggcagggcca

SEQ ID NO: 6225 - DNA, 20 bp, Unknown
  Description of Unknown: gRNA target site sequence
aggcagggccacggcgcctt

SEQ ID NO: 6226 - DNA, 20 bp, Unknown
  Description of Unknown: gRNA target site sequence
ggccacggcgccttcagccc

SEQ ID NO: 6227 - DNA, 20 bp, Unknown
  Description of Unknown: gRNA target site sequence
gccacggcgccttcagcccc

SEQ ID NO: 6228 - DNA, 20 bp, Unknown
  Description of Unknown: gRNA target site sequence
gcgccttcagccccgggccg

SEQ ID NO: 6229 - DNA, 20 bp, Unknown
  Description of Unknown: gRNA target site sequence
cgccttcagccccgggccgc

SEQ ID NO: 6230 - DNA, 20 bp, Unknown
  Description of Unknown: gRNA target site sequence
cttcagccccgggccgcagg

SEQ ID NO: 6231 - DNA, 20 bp, Unknown
  Description of Unknown: gRNA target site sequence
cagccccgggccgcaggcag

SEQ ID NO: 6232 - DNA, 20 bp, Unknown
  Description of Unknown: gRNA target site sequence
ccccgggccgcaggcagcag

SEQ ID NO: 6233 - DNA, 20 bp, Unknown
  Description of Unknown: gRNA target site sequence
cgggccgcaggcagcagcag

SEQ ID NO: 6234 - DNA, 20 bp, Unknown
  Description of Unknown: gRNA target site sequence
gccgcaggcagcagcagcag

SEQ ID NO: 6235 - DNA, 20 bp, Unknown
  Description of Unknown: gRNA target site sequence
gcaggcagcagcagcagcag

SEQ ID NO: 6236 - DNA, 20 bp, Unknown
  Description of Unknown: gRNA target site sequence
ggcagcagcagcagcagcag

SEQ ID NO: 6237 - DNA, 20 bp, Unknown
  Description of Unknown: gRNA target site sequence
agcagcagcagcagcagcag

SEQ ID NO: 6238 - DNA, 20 bp, Unknown
  Description of Unknown: gRNA target site sequence
agcagcagcagcagcagcag

SEQ ID NO: 6239 - DNA, 20 bp, Unknown
  Description of Unknown: gRNA target site sequence
agcagcagcagcagcagcag

SEQ ID NO: 6240 - DNA, 20 bp, Unknown
  Description of Unknown: gRNA target site sequence
cagcagcagcagcagcagca

SEQ ID NO: 6241 - DNA, 20 bp, Unknown
  Description of Unknown: gRNA target site sequence
cagcagcagcagcagagatt

SEQ ID NO: 6242 - DNA, 20 bp, Unknown
  Description of Unknown: gRNA target site sequence
agcagcagcagcagagattc

SEQ ID NO: 6243 - DNA, 20 bp, Unknown
  Description of Unknown: gRNA target site sequence
gcagcagcagcagagattca

SEQ ID NO: 6244 - DNA, 20 bp, Unknown
  Description of Unknown: gRNA target site sequence
agcagcagcagagattcagg

SEQ ID NO: 6245 - DNA, 20 bp, Unknown
  Description of Unknown: gRNA target site sequence
gcagcagagattcagggagc

SEQ ID NO: 6246 - DNA, 20 bp, Unknown
  Description of Unknown: gRNA target site sequence
gagattcagggagctggacg

SEQ ID NO: 6247 - DNA, 20 bp, Unknown
  Description of Unknown: gRNA target site sequence
agattcagggagctggacgc

SEQ ID NO: 6248 - DNA, 20 bp, Unknown
  Description of Unknown: gRNA target site sequence
ttcagggagctggacgcagg

SEQ ID NO: 6249 - DNA, 20 bp, Unknown
  Description of Unknown: gRNA target site sequence
ggacgcaggcagctctgtgc

SEQ ID NO: 6250 - DNA, 20 bp, Unknown
  Description of Unknown: gRNA target site sequence
cgcaggcagctctgtgctgg

SEQ ID NO: 6251 - DNA, 20 bp, Unknown
  Description of Unknown: gRNA target site sequence
gcaggcagctctgtgctggc

SEQ ID NO: 6252 - DNA, 20 bp, Unknown
  Description of Unknown: gRNA target site sequence
ctctgtgctggcaggacctg

SEQ ID NO: 6253 - DNA, 20 bp, Unknown
  Description of Unknown: gRNA target site sequence
tgtgctggcaggacctgaag

SEQ ID NO: 6254 - DNA, 20 bp, Unknown
  Description of Unknown: gRNA target site sequence
cctgaagcagtgactgcatc

SEQ ID NO: 6255 - DNA, 20 bp, Unknown
  Description of Unknown: gRNA target site sequence
actgcatctggccctccctg

SEQ ID NO: 6256 - DNA, 20 bp, Unknown
  Description of Unknown: gRNA target site sequence
ctgcatctggccctccctgt

SEQ ID NO: 6257 - DNA, 20 bp, Unknown
  Description of Unknown: gRNA target site sequence
tgcatctggccctccctgta

SEQ ID NO: 6258 - DNA, 20 bp, Unknown
  Description of Unknown: gRNA target site sequence
gcatctggccctccctgtag

SEQ ID NO: 6259 - DNA, 20 bp, Unknown
  Description of Unknown: gRNA target site sequence
ctggccctccctgtagggga

SEQ ID NO: 6260 - DNA, 20 bp, Unknown
  Description of Unknown: gRNA target site sequence
ggacggtgacacctgctgcc

SEQ ID NO: 6261 - DNA, 20 bp, Unknown
  Description of Unknown: gRNA target site sequence
gacggtgacacctgctgcct

SEQ ID NO: 6262 - DNA, 20 bp, Unknown
  Description of Unknown: gRNA target site sequence
cctgctgcctgggctcactg

SEQ ID NO: 6263 - DNA, 20 bp, Unknown
  Description of Unknown: gRNA target site sequence
ctgctgcctgggctcactgt

SEQ ID NO: 6264 - DNA, 20 bp, Unknown
  Description of Unknown: gRNA target site sequence
ctgggctcactgtgggcatt

SEQ ID NO: 6265 - DNA, 20 bp, Unknown
  Description of Unknown: gRNA target site sequence
cactgtgggcattgagacat

SEQ ID NO: 6266 - DNA, 20 bp, Unknown
  Description of Unknown: gRNA target site sequence
gcattgagacatgagtcctg

SEQ ID NO: 6267 - DNA, 20 bp, Unknown
  Description of Unknown: gRNA target site sequence
ttgagacatgagtcctgtgg

SEQ ID NO: 6268 - DNA, 20 bp, Unknown
  Description of Unknown: gRNA target site sequence
tgagacatgagtcctgtggt

SEQ ID NO: 6269 - DNA, 20 bp, Unknown
  Description of Unknown: gRNA target site sequence
gagacatgagtcctgtggtg

SEQ ID NO: 6270 - DNA, 20 bp, Unknown
  Description of Unknown: gRNA target site sequence
tcctgtggtggggctgtgcc

SEQ ID NO: 6271 - DNA, 20 bp, Unknown
  Description of Unknown: gRNA target site sequence
tggtggggctgtgcctggtg

SEQ ID NO: 6272 - DNA, 20 bp, Unknown
  Description of Unknown: gRNA target site sequence
ggtggggctgtgcctggtgc

SEQ ID NO: 6273 - DNA, 20 bp, Unknown
  Description of Unknown: gRNA target site sequence
ggctgtgcctggtgcaggtg

SEQ ID NO: 6274 - DNA, 20 bp, Unknown
  Description of Unknown: gRNA target site sequence
gctgtgcctggtgcaggtgc

SEQ ID NO: 6275 - DNA, 20 bp, Unknown
  Description of Unknown: gRNA target site sequence
tgcctggtgcaggtgcaggc

SEQ ID NO: 6276 - DNA, 20 bp, Unknown
  Description of Unknown: gRNA target site sequence
cctggtgcaggtgcaggctg

SEQ ID NO: 6277 - DNA, 20 bp, Unknown
  Description of Unknown: gRNA target site sequence
gcaggtgcaggctggagccc

SEQ ID NO: 6278 - DNA, 20 bp, Unknown
  Description of Unknown: gRNA target site sequence
gctggagccccggtcgcccc

SEQ ID NO: 6279 - DNA, 20 bp, Unknown
  Description of Unknown: gRNA target site sequence
ctggagccccggtcgccccc

SEQ ID NO: 6280 - DNA, 20 bp, Unknown
  Description of Unknown: gRNA target site sequence
gagccccggtcgcccccagg

SEQ ID NO: 6281 - DNA, 20 bp, Unknown
  Description of Unknown: gRNA target site sequence
ccggtcgcccccaggcagct

SEQ ID NO: 6282 - DNA, 20 bp, Unknown
  Description of Unknown: gRNA target site sequence
cccccaggcagctcagcccc

SEQ ID NO: 6283 - DNA, 20 bp, Unknown
  Description of Unknown: gRNA target site sequence
caggcagctcagcccctgga

SEQ ID NO: 6284 - DNA, 20 bp, Unknown
  Description of Unknown: gRNA target site sequence
agcccctggacggcctgcaa

SEQ ID NO: 6285 - DNA, 20 bp, Unknown
  Description of Unknown: gRNA target site sequence
gcaccctgcctgcttctcct

SEQ ID NO: 6286 - DNA, 20 bp, Unknown
  Description of Unknown: gRNA target site sequence
caccctgcctgcttctcctg

SEQ ID NO: 6287 - DNA, 20 bp, Unknown
  Description of Unknown: gRNA target site sequence
cctgaggaaatgcgctgacc

SEQ ID NO: 6288 - DNA, 20 bp, Unknown
  Description of Unknown: gRNA target site sequence
ctgaggaaatgcgctgaccc

SEQ ID NO: 6289 - DNA, 20 bp, Unknown
  Description of Unknown: gRNA target site sequence
aatgcgctgacccgggctca

SEQ ID NO: 6290 - DNA, 20 bp, Unknown
  Description of Unknown: gRNA target site sequence
gcgctgacccgggctcatgg

SEQ ID NO: 6291 - DNA, 20 bp, Unknown
  Description of Unknown: gRNA target site sequence
gctgacccgggctcatggtg

SEQ ID NO: 6292 - DNA, 20 bp, Unknown
  Description of Unknown: gRNA target site sequence
ctgacccgggctcatggtgg

SEQ ID NO: 6293 - DNA, 20 bp, Unknown
  Description of Unknown: gRNA target site sequence
tgacccgggctcatggtgga

SEQ ID NO: 6294 - DNA, 20 bp, Unknown
  Description of Unknown: gRNA target site sequence
ggctcatggtggagggtctg

SEQ ID NO: 6295 - DNA, 20 bp, Unknown
  Description of Unknown: gRNA target site sequence
gtggagggtctgcagaacac

SEQ ID NO: 6296 - DNA, 20 bp, Unknown
  Description of Unknown: gRNA target site sequence
gagggtctgcagaacactgg

SEQ ID NO: 6297 - DNA, 20 bp, Unknown
  Description of Unknown: gRNA target site sequence
tctgcagaacactggtggcc

SEQ ID NO: 6298 - DNA, 20 bp, Unknown
  Description of Unknown: gRNA target site sequence
ctgcagaacactggtggcca

SEQ ID NO: 6299 - DNA, 20 bp, Unknown
  Description of Unknown: gRNA target site sequence
cagaacactggtggccaagg

SEQ ID NO: 6300 - DNA, 20 bp, Unknown
  Description of Unknown: gRNA target site sequence
acactggtggccaaggaagc

SEQ ID NO: 6301 - DNA, 20 bp, Unknown
  Description of Unknown: gRNA target site sequence
tggtggccaaggaagccggt

SEQ ID NO: 6302 - DNA, 20 bp, Unknown
  Description of Unknown: gRNA target site sequence
gtggccaaggaagccggtca

SEQ ID NO: 6303 - DNA, 20 bp, Unknown
  Description of Unknown: gRNA target site sequence
tggccaaggaagccggtcag

SEQ ID NO: 6304 - DNA, 20 bp, Unknown
  Description of Unknown: gRNA target site sequence
ggccaaggaagccggtcaga

SEQ ID NO: 6305 - DNA, 20 bp, Unknown
  Description of Unknown: gRNA target site sequence
gccaaggaagccggtcagag

SEQ ID NO: 6306 - DNA, 20 bp, Unknown
  Description of Unknown: gRNA target site sequence
ggaagccggtcagaggggcc

SEQ ID NO: 6307 - DNA, 20 bp, Unknown
  Description of Unknown: gRNA target site sequence
aagccggtcagaggggccaa

SEQ ID NO: 6308 - DNA, 20 bp, Unknown
  Description of Unknown: gRNA target site sequence
ccggtcagaggggccaagag

SEQ ID NO: 6309 - DNA, 20 bp, Unknown
  Description of Unknown: gRNA target site sequence
ccaagagcagtgtccatcct

SEQ ID NO: 6310 - DNA, 20 bp, Unknown
  Description of Unknown: gRNA target site sequence
caagagcagtgtccatcctc

SEQ ID NO: 6311 - DNA, 20 bp, Unknown
  Description of Unknown: gRNA target site sequence
cagtgtccatcctcaggcct

SEQ ID NO: 6312 - DNA, 20 bp, Unknown
  Description of Unknown: gRNA target site sequence
tgtccatcctcaggcctcag

SEQ ID NO: 6313 - DNA, 20 bp, Unknown
  Description of Unknown: gRNA target site sequence
catcctcaggcctcagtggc

SEQ ID NO: 6314 - DNA, 20 bp, Unknown
  Description of Unknown: gRNA target site sequence
atcctcaggcctcagtggct

SEQ ID NO: 6315 - DNA, 20 bp, Unknown
  Description of Unknown: gRNA target site sequence
cctcagtggctgggcactcc

SEQ ID NO: 6316 - DNA, 20 bp, Unknown
  Description of Unknown: gRNA target site sequence
ctcagtggctgggcactccg

SEQ ID NO: 6317 - DNA, 20 bp, Unknown
  Description of Unknown: gRNA target site sequence
tcagtggctgggcactccga

SEQ ID NO: 6318 - DNA, 20 bp, Unknown
  Description of Unknown: gRNA target site sequence
ctgggcactccgagggccgt

SEQ ID NO: 6319 - DNA, 20 bp, Unknown
  Description of Unknown: gRNA target site sequence
cactccgagggccgtcagct

SEQ ID NO: 6320 - DNA, 20 bp, Unknown
  Description of Unknown: gRNA target site sequence
ggccgtcagctgagcccctg

SEQ ID NO: 6321 - DNA, 20 bp, Unknown
  Description of Unknown: gRNA target site sequence
gccgtcagctgagcccctgc

SEQ ID NO: 6322 - DNA, 20 bp, Unknown
  Description of Unknown: gRNA target site sequence
gtcagctgagcccctgcggg

SEQ ID NO: 6323 - DNA, 20 bp, Unknown
  Description of Unknown: gRNA target site sequence
tcagctgagcccctgcgggc

SEQ ID NO: 6324 - DNA, 20 bp, Unknown
  Description of Unknown: gRNA target site sequence
cagctgagcccctgcgggcg

SEQ ID NO: 6325 - DNA, 20 bp, Unknown
  Description of Unknown: gRNA target site sequence
agctgagcccctgcgggcgg

SEQ ID NO: 6326 - DNA, 20 bp, Unknown
  Description of Unknown: gRNA target site sequence
agcccctgcgggcgggggat

SEQ ID NO: 6327 - DNA, 20 bp, Unknown
  Description of Unknown: gRNA target site sequence
gcccctgcgggcgggggatg

SEQ ID NO: 6328 - DNA, 20 bp, Unknown
  Description of Unknown: gRNA target site sequence
ggatgaggtgcccattccgc

SEQ ID NO: 6329 - DNA, 20 bp, Unknown
  Description of Unknown: gRNA target site sequence
gatgaggtgcccattccgct

SEQ ID NO: 6330 - DNA, 20 bp, Unknown
  Description of Unknown: gRNA target site sequence
aggtgcccattccgctagga

SEQ ID NO: 6331 - DNA, 20 bp, Unknown
  Description of Unknown: gRNA target site sequence
cattccgctaggaaagacaa

SEQ ID NO: 6332 - DNA, 20 bp, Unknown
  Description of Unknown: gRNA target site sequence
tccgctaggaaagacaatgg

SEQ ID NO: 6333 - DNA, 20 bp, Unknown
  Description of Unknown: gRNA target site sequence
ggtggcatactccgtctgct

SEQ ID NO: 6334 - DNA, 20 bp, Unknown
  Description of Unknown: gRNA target site sequence
gtggcatactccgtctgctc

SEQ ID NO: 6335 - DNA, 20 bp, Unknown
  Description of Unknown: gRNA target site sequence
tggcatactccgtctgctca

SEQ ID NO: 6336 - DNA, 20 bp, Unknown
  Description of Unknown: gRNA target site sequence
actccgtctgctcagggaca

SEQ ID NO: 6337 - DNA, 20 bp, Unknown
  Description of Unknown: gRNA target site sequence
ctccgtctgctcagggacac

SEQ ID NO: 6338 - DNA, 20 bp, Unknown
  Description of Unknown: gRNA target site sequence
tccgtctgctcagggacaca

SEQ ID NO: 6339 - DNA, 20 bp, Unknown
  Description of Unknown: gRNA target site sequence
ctgctcagggacacagggca

SEQ ID NO: 6340 - DNA, 20 bp, Unknown
  Description of Unknown: gRNA target site sequence
tgctcagggacacagggcac

SEQ ID NO: 6341 - DNA, 20 bp, Unknown
  Description of Unknown: gRNA target site sequence
gctcagggacacagggcacg

SEQ ID NO: 6342 - DNA, 20 bp, Unknown
  Description of Unknown: gRNA target site sequence
ctcagggacacagggcacgg

SEQ ID NO: 6343 - DNA, 20 bp, Unknown
  Description of Unknown: gRNA target site sequence
tcagggacacagggcacggg

SEQ ID NO: 6344 - DNA, 20 bp, Unknown
  Description of Unknown: gRNA target site sequence
acacagggcacggggggctc

SEQ ID NO: 6345 - DNA, 20 bp, Unknown
  Description of Unknown: gRNA target site sequence
cacagggcacggggggctcc

SEQ ID NO: 6346 - DNA, 20 bp, Unknown
  Description of Unknown: gRNA target site sequence
acagggcacggggggctccg

SEQ ID NO: 6347 - DNA, 20 bp, Unknown
  Description of Unknown: gRNA target site sequence
ccggggtcttctctcgccac

SEQ ID NO: 6348 - DNA, 20 bp, Unknown
  Description of Unknown: gRNA target site sequence
ttctctcgccactggaaatc

SEQ ID NO: 6349 - DNA, 20 bp, Unknown
  Description of Unknown: gRNA target site sequence
actggaaatccagctcccca

SEQ ID NO: 6350 - DNA, 20 bp, Unknown
  Description of Unknown: gRNA target site sequence
atccagctccccatagtcca

SEQ ID NO: 6351 - DNA, 20 bp, Unknown
  Description of Unknown: gRNA target site sequence
ccagctccccatagtccaca

SEQ ID NO: 6352 - DNA, 20 bp, Unknown
  Description of Unknown: gRNA target site sequence
cccatagtccacagagaaca

SEQ ID NO: 6353 - DNA, 20 bp, Unknown
  Description of Unknown: gRNA target site sequence
ccatagtccacagagaacac

SEQ ID NO: 6354 - DNA, 20 bp, Unknown
  Description of Unknown: gRNA target site sequence
gtccacagagaacacaggca

SEQ ID NO: 6355 - DNA, 20 bp, Unknown
  Description of Unknown: gRNA target site sequence
cagagaacacaggcacggct

SEQ ID NO: 6356 - DNA, 20 bp, Unknown
  Description of Unknown: gRNA target site sequence
agagaacacaggcacggctg

SEQ ID NO: 6357 - DNA, 20 bp, Unknown
  Description of Unknown: gRNA target site sequence
gagaacacaggcacggctga

SEQ ID NO: 6358 - DNA, 20 bp, Unknown
  Description of Unknown: gRNA target site sequence
agaacacaggcacggctgag

SEQ ID NO: 6359 - DNA, 20 bp, Unknown
  Description of Unknown: gRNA target site sequence
ctgaggggtcctccttcttt

SEQ ID NO: 6360 - DNA, 20 bp, Unknown
  Description of Unknown: gRNA target site sequence
tgaggggtcctccttctttg

SEQ ID NO: 6361 - DNA, 20 bp, Unknown
  Description of Unknown: gRNA target site sequence
aggggtcctccttctttgag

SEQ ID NO: 6362 - DNA, 20 bp, Unknown
  Description of Unknown: gRNA target site sequence
gtcctccttctttgaggaga

SEQ ID NO: 6363 - DNA, 20 bp, Unknown
  Description of Unknown: gRNA target site sequence
tcctccttctttgaggagaa

SEQ ID NO: 6364 - DNA, 20 bp, Unknown
  Description of Unknown: gRNA target site sequence
cctccttctttgaggagaaa

SEQ ID NO: 6365 - DNA, 20 bp, Unknown
  Description of Unknown: gRNA target site sequence
tccttctttgaggagaaagg

SEQ ID NO: 6366 - DNA, 20 bp, Unknown
  Description of Unknown: gRNA target site sequence
cttctttgaggagaaaggga

SEQ ID NO: 6367 - DNA, 20 bp, Unknown
  Description of Unknown: gRNA target site sequence
ttctttgaggagaaagggag

SEQ ID NO: 6368 - DNA, 20 bp, Unknown
  Description of Unknown: gRNA target site sequence
tctttgaggagaaagggaga

SEQ ID NO: 6369 - DNA, 20 bp, Unknown
  Description of Unknown: gRNA target site sequence
tttgaggagaaagggagagg

SEQ ID NO: 6370 - DNA, 20 bp, Unknown
  Description of Unknown: gRNA target site sequence
aggagaaagggagagggagt

SEQ ID NO: 6371 - DNA, 20 bp, Unknown
  Description of Unknown: gRNA target site sequence
gggagagggagtcagcccca

SEQ ID NO: 6372 - DNA, 20 bp, Unknown
  Description of Unknown: gRNA target site sequence
gtcagccccacggcccaccg

SEQ ID NO: 6373 - DNA, 20 bp, Unknown
  Description of Unknown: gRNA target site sequence
tcagccccacggcccaccgc

SEQ ID NO: 6374 - DNA, 20 bp, Unknown
  Description of Unknown: gRNA target site sequence
gccccacggcccaccgcagg

SEQ ID NO: 6375 - DNA, 20 bp, Unknown
  Description of Unknown: gRNA target site sequence
ccccacggcccaccgcagga

SEQ ID NO: 6376 - DNA, 20 bp, Unknown
  Description of Unknown: gRNA target site sequence
ccacggcccaccgcaggaag

SEQ ID NO: 6377 - DNA, 20 bp, Unknown
  Description of Unknown: gRNA target site sequence
cacggcccaccgcaggaagg

SEQ ID NO: 6378 - DNA, 20 bp, Unknown
  Description of Unknown: gRNA target site sequence
caccgcaggaaggaggcccg

SEQ ID NO: 6379 - DNA, 20 bp, Unknown
  Description of Unknown: gRNA target site sequence
gaaggaggcccgcggctcca

SEQ ID NO: 6380 - DNA, 20 bp, Unknown
  Description of Unknown: gRNA target site sequence
aggcccgcggctccacagcc

SEQ ID NO: 6381 - DNA, 20 bp, Unknown
  Description of Unknown: gRNA target site sequence
gcggctccacagcctggctg

SEQ ID NO: 6382 - DNA, 20 bp, Unknown
  Description of Unknown: gRNA target site sequence
ccacagcctggctgcagtac

SEQ ID NO: 6383 - DNA, 20 bp, Unknown
  Description of Unknown: gRNA target site sequence
tgcagtaccggcaccgaacc

SEQ ID NO: 6384 - DNA, 20 bp, Unknown
  Description of Unknown: gRNA target site sequence
gcagtaccggcaccgaacct

SEQ ID NO: 6385 - DNA, 20 bp, Unknown
  Description of Unknown: gRNA target site sequence
gaacctgggccccccactat

SEQ ID NO: 6386 - DNA, 20 bp, Unknown
  Description of Unknown: gRNA target site sequence
cactatgagctgcttaccct

SEQ ID NO: 6387 - DNA, 20 bp, Unknown
  Description of Unknown: gRNA target site sequence
ccactgccctctgtgtgatc

SEQ ID NO: 6388 - DNA, 20 bp, Unknown
  Description of Unknown: gRNA target site sequence
cactgccctctgtgtgatct

SEQ ID NO: 6389 - DNA, 20 bp, Unknown
  Description of Unknown: gRNA target site sequence
actgccctctgtgtgatctg

SEQ ID NO: 6390 - DNA, 20 bp, Unknown
  Description of Unknown: gRNA target site sequence
gggacaccacccctcctctc

SEQ ID NO: 6391 - DNA, 20 bp, Unknown
  Description of Unknown: gRNA target site sequence
gtccccctctgaaatgtccc

SEQ ID NO: 6392 - DNA, 20 bp, Unknown
  Description of Unknown: gRNA target site sequence
aaatgtccctggcattcttg

SEQ ID NO: 6393 - DNA, 20 bp, Unknown
  Description of Unknown: gRNA target site sequence
ccctggcattcttgcagatt

SEQ ID NO: 6394 - DNA, 20 bp, Unknown
  Description of Unknown: gRNA target site sequence
cctggcattcttgcagattt

SEQ ID NO: 6395 - DNA, 20 bp, Unknown
  Description of Unknown: gRNA target site sequence
attccaaaatgtgacttttc

SEQ ID NO: 6396 - DNA, 20 bp, Unknown
  Description of Unknown: gRNA target site sequence
agctctcctgtctccaatgt

SEQ ID NO: 6397 - DNA, 20 bp, Unknown
  Description of Unknown: gRNA target site sequence
tcctgtctccaatgtaagat

SEQ ID NO: 6398 - DNA, 20 bp, Unknown
  Description of Unknown: gRNA target site sequence
atgtaagataagaaatgacc

SEQ ID NO: 6399 - DNA, 20 bp, Unknown
  Description of Unknown: gRNA target site sequence
aagcccaccccacgccctcg

SEQ ID NO: 6400 - DNA, 20 bp, Unknown
  Description of Unknown: gRNA target site sequence
agcccaccccacgccctcgc

SEQ ID NO: 6401 - DNA, 20 bp, Unknown
  Description of Unknown: gRNA target site sequence
ccaccccacgccctcgcagg

SEQ ID NO: 6402 - DNA, 20 bp, Unknown
  Description of Unknown: gRNA target site sequence
caccccacgccctcgcaggt

SEQ ID NO: 6403 - DNA, 20 bp, Unknown
  Description of Unknown: gRNA target site sequence
ctcgcaggtgggcacacgca

SEQ ID NO: 6404 - DNA, 20 bp, Unknown
  Description of Unknown: gRNA target site sequence
tcgcaggtgggcacacgcat

SEQ ID NO: 6405 - DNA, 20 bp, Unknown
  Description of Unknown: gRNA target site sequence
aggtgggcacacgcatgggc

SEQ ID NO: 6406 - DNA, 20 bp, Unknown
  Description of Unknown: gRNA target site sequence
ggtgggcacacgcatgggcc

SEQ ID NO: 6407 - DNA, 20 bp, Unknown
  Description of Unknown: gRNA target site sequence
acgcatgggccgggcacacc

SEQ ID NO: 6408 - DNA, 20 bp, Unknown
  Description of Unknown: gRNA target site sequence
gcatgggccgggcacacctg

SEQ ID NO: 6409 - DNA, 20 bp, Unknown
  Description of Unknown: gRNA target site sequence
ccgggcacacctggagaccg

SEQ ID NO: 6410 - DNA, 20 bp, Unknown
  Description of Unknown: gRNA target site sequence
cgggcacacctggagaccgc

SEQ ID NO: 6411 - DNA, 20 bp, Unknown
  Description of Unknown: gRNA target site sequence
gcacacctggagaccgcagg

SEQ ID NO: 6412 - DNA, 20 bp, Unknown
  Description of Unknown: gRNA target site sequence
cacacctggagaccgcaggc

SEQ ID NO: 6413 - DNA, 20 bp, Unknown
  Description of Unknown: gRNA target site sequence
accgcaggcaggcacatatg

SEQ ID NO: 6414 - DNA, 20 bp, Unknown
  Description of Unknown: gRNA target site sequence
ccgcaggcaggcacatatgt

SEQ ID NO: 6415 - DNA, 20 bp, Unknown
  Description of Unknown: gRNA target site sequence
aggcaggcacatatgtgggc

SEQ ID NO: 6416 - DNA, 20 bp, Unknown
  Description of Unknown: gRNA target site sequence
ggcaggcacatatgtgggcc

SEQ ID NO: 6417 - DNA, 20 bp, Unknown
  Description of Unknown: gRNA target site sequence
atatgtgggccgggcacccc

SEQ ID NO: 6418 - DNA, 20 bp, Unknown
  Description of Unknown: gRNA target site sequence
atgtgggccgggcaccccca

SEQ ID NO: 6419 - DNA, 20 bp, Unknown
  Description of Unknown: gRNA target site sequence
ccgggcacccccagagaccg

SEQ ID NO: 6420 - DNA, 20 bp, Unknown
  Description of Unknown: gRNA target site sequence
cgggcacccccagagaccgc

SEQ ID NO: 6421 - DNA, 20 bp, Unknown
  Description of Unknown: gRNA target site sequence
gcacccccagagaccgcagg

SEQ ID NO: 6422 - DNA, 20 bp, Unknown
  Description of Unknown: gRNA target site sequence
cacccccagagaccgcaggc

SEQ ID NO: 6423 - DNA, 20 bp, Unknown
  Description of Unknown: gRNA target site sequence
accgcaggcgggcacacgcg

SEQ ID NO: 6424 - DNA, 20 bp, Unknown
  Description of Unknown: gRNA target site sequence
ccgcaggcgggcacacgcgt

SEQ ID NO: 6425 - DNA, 20 bp, Unknown
  Description of Unknown: gRNA target site sequence
aggcgggcacacgcgtgggc

SEQ ID NO: 6426 - DNA, 20 bp, Unknown
  Description of Unknown: gRNA target site sequence
ggcgggcacacgcgtgggcc

SEQ ID NO: 6427 - DNA, 20 bp, Unknown
  Description of Unknown: gRNA target site sequence
acgcgtgggccaggcacccc

SEQ ID NO: 6428 - DNA, 20 bp, Unknown
  Description of Unknown: gRNA target site sequence
gcgtgggccaggcacccctg

SEQ ID NO: 6429 - DNA, 20 bp, Unknown
  Description of Unknown: gRNA target site sequence
ccaggcacccctggagaccg

SEQ ID NO: 6430 - DNA, 20 bp, Unknown
  Description of Unknown: gRNA target site sequence
caggcacccctggagaccgc

SEQ ID NO: 6431 - DNA, 20 bp, Unknown
  Description of Unknown: gRNA target site sequence
gcacccctggagaccgcagg

SEQ ID NO: 6432 - DNA, 20 bp, Unknown
  Description of Unknown: gRNA target site sequence
cacccctggagaccgcaggc

SEQ ID NO: 6433 - DNA, 20 bp, Unknown
  Description of Unknown: gRNA target site sequence
accgcaggcaggcacacaca

SEQ ID NO: 6434 - DNA, 20 bp, Unknown
  Description of Unknown: gRNA target site sequence
ccgcaggcaggcacacacat

SEQ ID NO: 6435 - DNA, 20 bp, Unknown
  Description of Unknown: gRNA target site sequence
aggcaggcacacacatgggc

SEQ ID NO: 6436 - DNA, 20 bp, Unknown
  Description of Unknown: gRNA target site sequence
ggcaggcacacacatgggcc

SEQ ID NO: 6437 - DNA, 20 bp, Unknown
  Description of Unknown: gRNA target site sequence
acacatgggccgggcacccc

SEQ ID NO: 6438 - DNA, 20 bp, Unknown
  Description of Unknown: gRNA target site sequence
acatgggccgggcacccccg

SEQ ID NO: 6439 - DNA, 20 bp, Unknown
  Description of Unknown: gRNA target site sequence
ccgggcacccccggagaccg

SEQ ID NO: 6440 - DNA, 20 bp, Unknown
  Description of Unknown: gRNA target site sequence
cgggcacccccggagaccgc

SEQ ID NO: 6441 - DNA, 20 bp, Unknown
  Description of Unknown: gRNA target site sequence
gcacccccggagaccgcagg

SEQ ID NO: 6442 - DNA, 20 bp, Unknown
  Description of Unknown: gRNA target site sequence
cacccccggagaccgcaggt

SEQ ID NO: 6443 - DNA, 20 bp, Unknown
  Description of Unknown: gRNA target site sequence
cccggagaccgcaggtgggc

SEQ ID NO: 6444 - DNA, 20 bp, Unknown
  Description of Unknown: gRNA target site sequence
ccggagaccgcaggtgggct

SEQ ID NO: 6445 - DNA, 20 bp, Unknown
  Description of Unknown: gRNA target site sequence
cggagaccgcaggtgggctg

SEQ ID NO: 6446 - DNA, 20 bp, Unknown
  Description of Unknown: gRNA target site sequence
ccgcaggtgggctggggccc

SEQ ID NO: 6447 - DNA, 20 bp, Unknown
  Description of Unknown: gRNA target site sequence
tgggctggggccccagatca

SEQ ID NO: 6448 - DNA, 20 bp, Unknown
  Description of Unknown: gRNA target site sequence
ggggccccagatcatggctt

SEQ ID NO: 6449 - DNA, 20 bp, Unknown
  Description of Unknown: gRNA target site sequence
gggccccagatcatggcttt

SEQ ID NO: 6450 - DNA, 20 bp, Unknown
  Description of Unknown: gRNA target site sequence
ggccccagatcatggcttta

SEQ ID NO: 6451 - DNA, 20 bp, Unknown
  Description of Unknown: gRNA target site sequence
agatcatggctttagggatt

SEQ ID NO: 6452 - DNA, 20 bp, Unknown
  Description of Unknown: gRNA target site sequence
gatcatggctttagggattg

SEQ ID NO: 6453 - DNA, 20 bp, Unknown
  Description of Unknown: gRNA target site sequence
tagggattgaggttgctgcc

SEQ ID NO: 6454 - DNA, 20 bp, Unknown
  Description of Unknown: gRNA target site sequence
agggattgaggttgctgcct

SEQ ID NO: 6455 - DNA, 20 bp, Unknown
  Description of Unknown: gRNA target site sequence
gggattgaggttgctgcctg

SEQ ID NO: 6456 - DNA, 20 bp, Unknown
  Description of Unknown: gRNA target site sequence
ggattgaggttgctgcctgg

SEQ ID NO: 6457 - DNA, 20 bp, Unknown
  Description of Unknown: gRNA target site sequence
tgaggttgctgcctgggggc

SEQ ID NO: 6458 - DNA, 20 bp, Unknown
  Description of Unknown: gRNA target site sequence
gaggttgctgcctgggggct

SEQ ID NO: 6459 - DNA, 20 bp, Unknown
  Description of Unknown: gRNA target site sequence
aggttgctgcctgggggctg

SEQ ID NO: 6460 - DNA, 20 bp, Unknown
  Description of Unknown: gRNA target site sequence
gttgctgcctgggggctggg

SEQ ID NO: 6461 - DNA, 20 bp, Unknown
  Description of Unknown: gRNA target site sequence
ttgctgcctgggggctgggg

SEQ ID NO: 6462 - DNA, 20 bp, Unknown
  Description of Unknown: gRNA target site sequence
ctgcctgggggctggggagg

SEQ ID NO: 6463 - DNA, 20 bp, Unknown
  Description of Unknown: gRNA target site sequence
tgcctgggggctggggaggt

SEQ ID NO: 6464 - DNA, 20 bp, Unknown
  Description of Unknown: gRNA target site sequence
gcctgggggctggggaggtg

SEQ ID NO: 6465 - DNA, 20 bp, Unknown
  Description of Unknown: gRNA target site sequence
gggctggggaggtggggtcc

SEQ ID NO: 6466 - DNA, 20 bp, Unknown
  Description of Unknown: gRNA target site sequence
aggtggggtcctggctataa

SEQ ID NO: 6467 - DNA, 20 bp, Unknown
  Description of Unknown: gRNA target site sequence
tcctggctataatagaatgt

SEQ ID NO: 6468 - DNA, 20 bp, Unknown
  Description of Unknown: gRNA target site sequence
ataatagaatgtgagtcctg

SEQ ID NO: 6469 - DNA, 20 bp, Unknown
  Description of Unknown: gRNA target site sequence
taatagaatgtgagtcctgc

SEQ ID NO: 6470 - DNA, 20 bp, Unknown
  Description of Unknown: gRNA target site sequence
tgtgagtcctgcaggccgtg

SEQ ID NO: 6471 - DNA, 20 bp, Unknown
  Description of Unknown: gRNA target site sequence
tcctgcaggccgtgtggtcc

SEQ ID NO: 6472 - DNA, 20 bp, Unknown
  Description of Unknown: gRNA target site sequence
tccttccacctctgcccacc

SEQ ID NO: 6473 - DNA, 20 bp, Unknown
  Description of Unknown: gRNA target site sequence
ccttccacctctgcccaccc

SEQ ID NO: 6474 - DNA, 20 bp, Unknown
  Description of Unknown: gRNA target site sequence
tccacctctgcccacccagg

SEQ ID NO: 6475 - DNA, 20 bp, Unknown
  Description of Unknown: gRNA target site sequence
ccacctctgcccacccagga

SEQ ID NO: 6476 - DNA, 20 bp, Unknown
  Description of Unknown: gRNA target site sequence
cctctgcccacccaggaagg

SEQ ID NO: 6477 - DNA, 20 bp, Unknown
  Description of Unknown: gRNA target site sequence
ctctgcccacccaggaagga

SEQ ID NO: 6478 - DNA, 20 bp, Unknown
  Description of Unknown: gRNA target site sequence
cccacccaggaaggaaggca

SEQ ID NO: 6479 - DNA, 20 bp, Unknown
  Description of Unknown: gRNA target site sequence
acccaggaaggaaggcacag

SEQ ID NO: 6480 - DNA, 20 bp, Unknown
  Description of Unknown: gRNA target site sequence
ggaaggcacagtggatcatg

SEQ ID NO: 6481 - DNA, 20 bp, Unknown
  Description of Unknown: gRNA target site sequence
gaaggcacagtggatcatgc

SEQ ID NO: 6482 - DNA, 20 bp, Unknown
  Description of Unknown: gRNA target site sequence
cacagtggatcatgcaggaa

SEQ ID NO: 6483 - DNA, 20 bp, Unknown
  Description of Unknown: gRNA target site sequence
cagtggatcatgcaggaaaa

SEQ ID NO: 6484 - DNA, 20 bp, Unknown
  Description of Unknown: gRNA target site sequence
ggatcatgcaggaaaagagt

SEQ ID NO: 6485 - DNA, 20 bp, Unknown
  Description of Unknown: gRNA target site sequence
aggaaaagagtgagactcac

SEQ ID NO: 6486 - DNA, 20 bp, Unknown
  Description of Unknown: gRNA target site sequence
ggaaaagagtgagactcacc

SEQ ID NO: 6487 - DNA, 20 bp, Unknown
  Description of Unknown: gRNA target site sequence
gaaaagagtgagactcacca

SEQ ID NO: 6488 - DNA, 20 bp, Unknown
  Description of Unknown: gRNA target site sequence
aaaagagtgagactcaccag

SEQ ID NO: 6489 - DNA, 20 bp, Unknown
  Description of Unknown: gRNA target site sequence
gagtgagactcaccaggggc

SEQ ID NO: 6490 - DNA, 20 bp, Unknown
  Description of Unknown: gRNA target site sequence
gagactcaccaggggctggc

SEQ ID NO: 6491 - DNA, 20 bp, Unknown
  Description of Unknown: gRNA target site sequence
caggggctggccggtgcgcc

SEQ ID NO: 6492 - DNA, 20 bp, Unknown
  Description of Unknown: gRNA target site sequence
cctggctcctattgtccctg

SEQ ID NO: 6493 - DNA, 20 bp, Unknown
  Description of Unknown: gRNA target site sequence
tggctcctattgtccctgca

SEQ ID NO: 6494 - DNA, 20 bp, Unknown
  Description of Unknown: gRNA target site sequence
tccctgcagagaaacacact

SEQ ID NO: 6495 - DNA, 20 bp, Unknown
  Description of Unknown: gRNA target site sequence
ccctgcagagaaacacactt

SEQ ID NO: 6496 - DNA, 20 bp, Unknown
  Description of Unknown: gRNA target site sequence
cctgcagagaaacacacttg

SEQ ID NO: 6497 - DNA, 20 bp, Unknown
  Description of Unknown: gRNA target site sequence
agaaacacacttggggtcac

SEQ ID NO: 6498 - DNA, 20 bp, Unknown
  Description of Unknown: gRNA target site sequence
gaaacacacttggggtcacc

SEQ ID NO: 6499 - DNA, 20 bp, Unknown
  Description of Unknown: gRNA target site sequence
ggggtcaccaggccgaccct

SEQ ID NO: 6500 - DNA, 20 bp, Unknown
  Description of Unknown: gRNA target site sequence
ccgaccctgagccgtgctcc

SEQ ID NO: 6501 - DNA, 20 bp, Unknown
  Description of Unknown: gRNA target site sequence
cgaccctgagccgtgctcct

SEQ ID NO: 6502 - DNA, 20 bp, Unknown
  Description of Unknown: gRNA target site sequence
ccctgagccgtgctcctagg

SEQ ID NO: 6503 - DNA, 20 bp, Unknown
  Description of Unknown: gRNA target site sequence
cctgagccgtgctcctaggt

SEQ ID NO: 6504 - DNA, 20 bp, Unknown
  Description of Unknown: gRNA target site sequence
ctgagccgtgctcctaggtg

SEQ ID NO: 6505 - DNA, 20 bp, Unknown
  Description of Unknown: gRNA target site sequence
tgagccgtgctcctaggtgg

SEQ ID NO: 6506 - DNA, 20 bp, Unknown
  Description of Unknown: gRNA target site sequence
gagccgtgctcctaggtggg

SEQ ID NO: 6507 - DNA, 20 bp, Unknown
  Description of Unknown: gRNA target site sequence
tgctcctaggtggggggtct

SEQ ID NO: 6508 - DNA, 20 bp, Unknown
  Description of Unknown: gRNA target site sequence
ctaggtggggggtcttagtc

SEQ ID NO: 6509 - DNA, 20 bp, Unknown
  Description of Unknown: gRNA target site sequence
taggtggggggtcttagtcc

SEQ ID NO: 6510 - DNA, 20 bp, Unknown
  Description of Unknown: gRNA target site sequence
aggtggggggtcttagtcca

SEQ ID NO: 6511 - DNA, 20 bp, Unknown
  Description of Unknown: gRNA target site sequence
ggtggggggtcttagtccag

SEQ ID NO: 6512 - DNA, 20 bp, Unknown
  Description of Unknown: gRNA target site sequence
cttagtccaggggccttcat

SEQ ID NO: 6513 - DNA, 20 bp, Unknown
  Description of Unknown: gRNA target site sequence
ttagtccaggggccttcatc

SEQ ID NO: 6514 - DNA, 20 bp, Unknown
  Description of Unknown: gRNA target site sequence
tagtccaggggccttcatca

SEQ ID NO: 6515 - DNA, 20 bp, Unknown
  Description of Unknown: gRNA target site sequence
aggggccttcatcagggact

SEQ ID NO: 6516 - DNA, 20 bp, Unknown
  Description of Unknown: gRNA target site sequence
ccttcatcagggacttagcc

SEQ ID NO: 6517 - DNA, 20 bp, Unknown
  Description of Unknown: gRNA target site sequence
tcatcagggacttagcctgg

SEQ ID NO: 6518 - DNA, 20 bp, Unknown
  Description of Unknown: gRNA target site sequence
catcagggacttagcctggc

SEQ ID NO: 6519 - DNA, 20 bp, Unknown
  Description of Unknown: gRNA target site sequence
atcagggacttagcctggcg

SEQ ID NO: 6520 - DNA, 20 bp, Unknown
  Description of Unknown: gRNA target site sequence
cagggacttagcctggcggg

SEQ ID NO: 6521 - DNA, 20 bp, Unknown
  Description of Unknown: gRNA target site sequence
gacttagcctggcggggaga

SEQ ID NO: 6522 - DNA, 20 bp, Unknown
  Description of Unknown: gRNA target site sequence
acttagcctggcggggagat

SEQ ID NO: 6523 - DNA, 20 bp, Unknown
  Description of Unknown: gRNA target site sequence
cttagcctggcggggagatg

SEQ ID NO: 6524 - DNA, 20 bp, Unknown
  Description of Unknown: gRNA target site sequence
ttagcctggcggggagatgg

SEQ ID NO: 6525 - DNA, 20 bp, Unknown
  Description of Unknown: gRNA target site sequence
tagcctggcggggagatggg

SEQ ID NO: 6526 - DNA, 20 bp, Unknown
  Description of Unknown: gRNA target site sequence
gcctggcggggagatggggg

SEQ ID NO: 6527 - DNA, 20 bp, Unknown
  Description of Unknown: gRNA target site sequence
cctggcggggagatgggggg

SEQ ID NO: 6528 - DNA, 20 bp, Unknown
  Description of Unknown: gRNA target site sequence
ggcggggagatggggggagg

SEQ ID NO: 6529 - DNA, 20 bp, Unknown
  Description of Unknown: gRNA target site sequence
gcggggagatggggggaggt

SEQ ID NO: 6530 - DNA, 20 bp, Unknown
  Description of Unknown: gRNA target site sequence
cggggagatggggggaggtg

SEQ ID NO: 6531 - DNA, 20 bp, Unknown
  Description of Unknown: gRNA target site sequence
ggagatggggggaggtgggg

SEQ ID NO: 6532 - DNA, 20 bp, Unknown
  Description of Unknown: gRNA target site sequence
gagatggggggaggtggggt

SEQ ID NO: 6533 - DNA, 20 bp, Unknown
  Description of Unknown: gRNA target site sequence
agatggggggaggtggggtg

SEQ ID NO: 6534 - DNA, 20 bp, Unknown
  Description of Unknown: gRNA target site sequence
ggggggaggtggggtggggt

SEQ ID NO: 6535 - DNA, 20 bp, Unknown
  Description of Unknown: gRNA target site sequence
gggggaggtggggtggggtg

SEQ ID NO: 6536 - DNA, 20 bp, Unknown
  Description of Unknown: gRNA target site sequence
ggggaggtggggtggggtga

SEQ ID NO: 6537 - DNA, 20 bp, Unknown
  Description of Unknown: gRNA target site sequence
gaggtggggtggggtgaggg

SEQ ID NO: 6538 - DNA, 20 bp, Unknown
  Description of Unknown: gRNA target site sequence
aggtggggtggggtgaggga

SEQ ID NO: 6539 - DNA, 20 bp, Unknown
  Description of Unknown: gRNA target site sequence
ggtggggtggggtgagggaa

SEQ ID NO: 6540 - DNA, 20 bp, Unknown
  Description of Unknown: gRNA target site sequence
ggggtggggtgagggaaggg

SEQ ID NO: 6541 - DNA, 20 bp, Unknown
  Description of Unknown: gRNA target site sequence
ggtggggtgagggaagggtg

SEQ ID NO: 6542 - DNA, 20 bp, Unknown
  Description of Unknown: gRNA target site sequence
gtggggtgagggaagggtgg

SEQ ID NO: 6543 - DNA, 20 bp, Unknown
  Description of Unknown: gRNA target site sequence
gggtgagggaagggtggagg

SEQ ID NO: 6544 - DNA, 20 bp, Unknown
  Description of Unknown: gRNA target site sequence
ggtgagggaagggtggagga

SEQ ID NO: 6545 - DNA, 20 bp, Unknown
  Description of Unknown: gRNA target site sequence
gtgagggaagggtggaggaa

SEQ ID NO: 6546 - DNA, 20 bp, Unknown
  Description of Unknown: gRNA target site sequence
tgagggaagggtggaggaag

SEQ ID NO: 6547 - DNA, 20 bp, Unknown
  Description of Unknown: gRNA target site sequence
agggaagggtggaggaaggg

SEQ ID NO: 6548 - DNA, 20 bp, Unknown
  Description of Unknown: gRNA target site sequence
gggaagggtggaggaagggg

SEQ ID NO: 6549 - DNA, 20 bp, Unknown
  Description of Unknown: gRNA target site sequence
aagggtggaggaaggggagg

SEQ ID NO: 6550 - DNA, 20 bp, Unknown
  Description of Unknown: gRNA target site sequence
agggtggaggaaggggaggc

SEQ ID NO: 6551 - DNA, 20 bp, Unknown
  Description of Unknown: gRNA target site sequence
ggtggaggaaggggaggcgg

SEQ ID NO: 6552 - DNA, 20 bp, Unknown
  Description of Unknown: gRNA target site sequence
gaggaaggggaggcgggagt

SEQ ID NO: 6553 - DNA, 20 bp, Unknown
  Description of Unknown: gRNA target site sequence
aggaaggggaggcgggagtg

SEQ ID NO: 6554 - DNA, 20 bp, Unknown
  Description of Unknown: gRNA target site sequence
ggaaggggaggcgggagtga

SEQ ID NO: 6555 - DNA, 20 bp, Unknown
  Description of Unknown: gRNA target site sequence
gaggcgggagtgagggccgc

SEQ ID NO: 6556 - DNA, 20 bp, Unknown
  Description of Unknown: gRNA target site sequence
gcgggagtgagggccgccag

SEQ ID NO: 6557 - DNA, 20 bp, Unknown
  Description of Unknown: gRNA target site sequence
cgggagtgagggccgccagc

SEQ ID NO: 6558 - DNA, 20 bp, Unknown
  Description of Unknown: gRNA target site sequence
gggagtgagggccgccagca

SEQ ID NO: 6559 - DNA, 20 bp, Unknown
  Description of Unknown: gRNA target site sequence
gtgagggccgccagcagggt

SEQ ID NO: 6560 - DNA, 20 bp, Unknown
  Description of Unknown: gRNA target site sequence
tgagggccgccagcagggtt

SEQ ID NO: 6561 - DNA, 20 bp, Unknown
  Description of Unknown: gRNA target site sequence
gagggccgccagcagggtta

SEQ ID NO: 6562 - DNA, 20 bp, Unknown
  Description of Unknown: gRNA target site sequence
ggccgccagcagggttaggg

SEQ ID NO: 6563 - DNA, 20 bp, Unknown
  Description of Unknown: gRNA target site sequence
gccgccagcagggttagggc

SEQ ID NO: 6564 - DNA, 20 bp, Unknown
  Description of Unknown: gRNA target site sequence
ccgccagcagggttagggca

SEQ ID NO: 6565 - DNA, 20 bp, Unknown
  Description of Unknown: gRNA target site sequence
ccagcagggttagggcaggg

SEQ ID NO: 6566 - DNA, 20 bp, Unknown
  Description of Unknown: gRNA target site sequence
cagcagggttagggcagggc

SEQ ID NO: 6567 - DNA, 20 bp, Unknown
  Description of Unknown: gRNA target site sequence
gggttagggcagggcaggcc

SEQ ID NO: 6568 - DNA, 20 bp, Unknown
  Description of Unknown: gRNA target site sequence
ggttagggcagggcaggccg

SEQ ID NO: 6569 - DNA, 20 bp, Unknown
  Description of Unknown: gRNA target site sequence
gttagggcagggcaggccga

SEQ ID NO: 6570 - DNA, 20 bp, Unknown
  Description of Unknown: gRNA target site sequence
ttagggcagggcaggccgag

SEQ ID NO: 6571 - DNA, 20 bp, Unknown
  Description of Unknown: gRNA target site sequence
ggcagggcaggccgaggggc

SEQ ID NO: 6572 - DNA, 20 bp, Unknown
  Description of Unknown: gRNA target site sequence
gcagggcaggccgaggggct

SEQ ID NO: 6573 - DNA, 20 bp, Unknown
  Description of Unknown: gRNA target site sequence
tgggatgacgttacctcgtg

SEQ ID NO: 6574 - DNA, 20 bp, Unknown
  Description of Unknown: gRNA target site sequence
tgacgttacctcgtgcggcc

SEQ ID NO: 6575 - DNA, 20 bp, Unknown
  Description of Unknown: gRNA target site sequence
gacgttacctcgtgcggccc

SEQ ID NO: 6576 - DNA, 20 bp, Unknown
  Description of Unknown: gRNA target site sequence
cgttacctcgtgcggcccgg

SEQ ID NO: 6577 - DNA, 20 bp, Unknown
  Description of Unknown: gRNA target site sequence
tacctcgtgcggcccgggag

SEQ ID NO: 6578 - DNA, 20 bp, Unknown
  Description of Unknown: gRNA target site sequence
tgcggcccgggagcagatga

SEQ ID NO: 6579 - DNA, 20 bp, Unknown
  Description of Unknown: gRNA target site sequence
gcccgggagcagatgacggc

SEQ ID NO: 6580 - DNA, 20 bp, Unknown
  Description of Unknown: gRNA target site sequence
cccgggagcagatgacggcc

SEQ ID NO: 6581 - DNA, 20 bp, Unknown
  Description of Unknown: gRNA target site sequence
agcagatgacggccaggacc

SEQ ID NO: 6582 - DNA, 20 bp, Unknown
  Description of Unknown: gRNA target site sequence
atgacggccaggacccagac

SEQ ID NO: 6583 - DNA, 20 bp, Unknown
  Description of Unknown: gRNA target site sequence
acggccaggacccagactag

SEQ ID NO: 6584 - DNA, 20 bp, Unknown
  Description of Unknown: gRNA target site sequence
aggacccagactagcagcac

SEQ ID NO: 6585 - DNA, 20 bp, Unknown
  Description of Unknown: gRNA target site sequence
ggacccagactagcagcacc

SEQ ID NO: 6586 - DNA, 20 bp, Unknown
  Description of Unknown: gRNA target site sequence
actagcagcaccaggctgcc

SEQ ID NO: 6587 - DNA, 20 bp, Unknown
  Description of Unknown: gRNA target site sequence
agcagcaccaggctgcccag

SEQ ID NO: 6588 - DNA, 20 bp, Unknown
  Description of Unknown: gRNA target site sequence
gcagcaccaggctgcccagc

SEQ ID NO: 6589 - DNA, 20 bp, Unknown
  Description of Unknown: gRNA target site sequence
ccgcccacgacaccaaccac

SEQ ID NO: 6590 - DNA, 20 bp, Unknown
  Description of Unknown: gRNA target site sequence
cgcccacgacaccaaccacc

SEQ ID NO: 6591 - DNA, 20 bp, Unknown
  Description of Unknown: gRNA target site sequence
gcccacgacaccaaccacca

SEQ ID NO: 6592 - DNA, 20 bp, Unknown
  Description of Unknown: gRNA target site sequence
cgacaccaaccaccagggtt

SEQ ID NO: 6593 - DNA, 20 bp, Unknown
  Description of Unknown: gRNA target site sequence
caaccaccagggtttggaac

SEQ ID NO: 6594 - DNA, 20 bp, Unknown
  Description of Unknown: gRNA target site sequence
caccagggtttggaactggc

SEQ ID NO: 6595 - DNA, 20 bp, Unknown
  Description of Unknown: gRNA target site sequence
agggtttggaactggccggc

SEQ ID NO: 6596 - DNA, 20 bp, Unknown
  Description of Unknown: gRNA target site sequence
ttggaactggccggctggcc

SEQ ID NO: 6597 - DNA, 20 bp, Unknown
  Description of Unknown: gRNA target site sequence
tggaactggccggctggcct

SEQ ID NO: 6598 - DNA, 20 bp, Unknown
  Description of Unknown: gRNA target site sequence
actggccggctggcctgggt

SEQ ID NO: 6599 - DNA, 20 bp, Unknown
  Description of Unknown: gRNA target site sequence
ctggccggctggcctgggtg

SEQ ID NO: 6600 - DNA, 20 bp, Unknown
  Description of Unknown: gRNA target site sequence
tggccggctggcctgggtga

SEQ ID NO: 6601 - DNA, 20 bp, Unknown
  Description of Unknown: gRNA target site sequence
ggccggctggcctgggtgag

SEQ ID NO: 6602 - DNA, 20 bp, Unknown
  Description of Unknown: gRNA target site sequence
ggctggcctgggtgaggggc

SEQ ID NO: 6603 - DNA, 20 bp, Unknown
  Description of Unknown: gRNA target site sequence
gctggcctgggtgaggggct

SEQ ID NO: 6604 - DNA, 20 bp, Unknown
  Description of Unknown: gRNA target site sequence
ctggcctgggtgaggggctg

SEQ ID NO: 6605 - DNA, 20 bp, Unknown
  Description of Unknown: gRNA target site sequence
gcctgggtgaggggctgggg

SEQ ID NO: 6606 - DNA, 20 bp, Unknown
  Description of Unknown: gRNA target site sequence
cctgggtgaggggctggggt

SEQ ID NO: 6607 - DNA, 20 bp, Unknown
  Description of Unknown: gRNA target site sequence
tgaggggctggggtgggctg

SEQ ID NO: 6608 - DNA, 20 bp, Unknown
  Description of Unknown: gRNA target site sequence
gaggggctggggtgggctgt

SEQ ID NO: 6609 - DNA, 20 bp, Unknown
  Description of Unknown: gRNA target site sequence
ggcacttctgcccttctctc

SEQ ID NO: 6610 - DNA, 20 bp, Unknown
  Description of Unknown: gRNA target site sequence
acttctgcccttctctctgg

SEQ ID NO: 6611 - DNA, 20 bp, Unknown
  Description of Unknown: gRNA target site sequence
cttctgcccttctctctgga

SEQ ID NO: 6612 - DNA, 20 bp, Unknown
  Description of Unknown: gRNA target site sequence
ttctgcccttctctctggaa

SEQ ID NO: 6613 - DNA, 20 bp, Unknown
  Description of Unknown: gRNA target site sequence
cttctctctggaagggcaca

SEQ ID NO: 6614 - DNA, 20 bp, Unknown
  Description of Unknown: gRNA target site sequence
ttctctctggaagggcacaa

SEQ ID NO: 6615 - DNA, 20 bp, Unknown
  Description of Unknown: gRNA target site sequence
ctctggaagggcacaaaggt

SEQ ID NO: 6616 - DNA, 20 bp, Unknown
  Description of Unknown: gRNA target site sequence
tctggaagggcacaaaggtc

SEQ ID NO: 6617 - DNA, 20 bp, Unknown
  Description of Unknown: gRNA target site sequence
ctggaagggcacaaaggtca

SEQ ID NO: 6618 - DNA, 20 bp, Unknown
  Description of Unknown: gRNA target site sequence
tggaagggcacaaaggtcag

SEQ ID NO: 6619 - DNA, 20 bp, Unknown
  Description of Unknown: gRNA target site sequence
agggcacaaaggtcaggggt

SEQ ID NO: 6620 - DNA, 20 bp, Unknown
  Description of Unknown: gRNA target site sequence
gggcacaaaggtcaggggtt

SEQ ID NO: 6621 - DNA, 20 bp, Unknown
  Description of Unknown: gRNA target site sequence
acaaaggtcaggggttagga

SEQ ID NO: 6622 - DNA, 20 bp, Unknown
  Description of Unknown: gRNA target site sequence
caaaggtcaggggttaggac

SEQ ID NO: 6623 - DNA, 20 bp, Unknown
  Description of Unknown: gRNA target site sequence
aaaggtcaggggttaggacg

SEQ ID NO: 6624 - DNA, 20 bp, Unknown
  Description of Unknown: gRNA target site sequence
gtcaggggttaggacggggt

SEQ ID NO: 6625 - DNA, 20 bp, Unknown
  Description of Unknown: gRNA target site sequence
tcaggggttaggacggggtc

SEQ ID NO: 6626 - DNA, 20 bp, Unknown
  Description of Unknown: gRNA target site sequence
caggggttaggacggggtca

SEQ ID NO: 6627 - DNA, 20 bp, Unknown
  Description of Unknown: gRNA target site sequence
gggttaggacggggtcaggg

SEQ ID NO: 6628 - DNA, 20 bp, Unknown
  Description of Unknown: gRNA target site sequence
gttaggacggggtcagggtg

SEQ ID NO: 6629 - DNA, 20 bp, Unknown
  Description of Unknown: gRNA target site sequence
ttaggacggggtcagggtgg

SEQ ID NO: 6630 - DNA, 20 bp, Unknown
  Description of Unknown: gRNA target site sequence
taggacggggtcagggtgga

SEQ ID NO: 6631 - DNA, 20 bp, Unknown
  Description of Unknown: gRNA target site sequence
acggggtcagggtggagggt

SEQ ID NO: 6632 - DNA, 20 bp, Unknown
  Description of Unknown: gRNA target site sequence
cggggtcagggtggagggtc

SEQ ID NO: 6633 - DNA, 20 bp, Unknown
  Description of Unknown: gRNA target site sequence
ggggtcagggtggagggtca

SEQ ID NO: 6634 - DNA, 20 bp, Unknown
  Description of Unknown: gRNA target site sequence
tcagggtggagggtcagggt

SEQ ID NO: 6635 - DNA, 20 bp, Unknown
  Description of Unknown: gRNA target site sequence
cagggtggagggtcagggtc

SEQ ID NO: 6636 - DNA, 20 bp, Unknown
  Description of Unknown: gRNA target site sequence
agggtggagggtcagggtca

SEQ ID NO: 6637 - DNA, 20 bp, Unknown
  Description of Unknown: gRNA target site sequence
gggtggagggtcagggtcag

SEQ ID NO: 6638 - DNA, 20 bp, Unknown
  Description of Unknown: gRNA target site sequence
ggagggtcagggtcaggggt

SEQ ID NO: 6639 - DNA, 20 bp, Unknown
  Description of Unknown: gRNA target site sequence
gagggtcagggtcaggggtg

SEQ ID NO: 6640 - DNA, 20 bp, Unknown
  Description of Unknown: gRNA target site sequence
agggtcagggtcaggggtga

SEQ ID NO: 6641 - DNA, 20 bp, Unknown
  Description of Unknown: gRNA target site sequence
gtcagggtcaggggtgaggg

SEQ ID NO: 6642 - DNA, 20 bp, Unknown
  Description of Unknown: gRNA target site sequence
ggtcaggggtgagggcagac

SEQ ID NO: 6643 - DNA, 20 bp, Unknown
  Description of Unknown: gRNA target site sequence
tcaggggtgagggcagacta

SEQ ID NO: 6644 - DNA, 20 bp, Unknown
  Description of Unknown: gRNA target site sequence
caggggtgagggcagactag

SEQ ID NO: 6645 - DNA, 20 bp, Unknown
  Description of Unknown: gRNA target site sequence
aggggtgagggcagactaga

SEQ ID NO: 6646 - DNA, 20 bp, Unknown
  Description of Unknown: gRNA target site sequence
ggggtgagggcagactagag

SEQ ID NO: 6647 - DNA, 20 bp, Unknown
  Description of Unknown: gRNA target site sequence
tgagggcagactagaggggc

SEQ ID NO: 6648 - DNA, 20 bp, Unknown
  Description of Unknown: gRNA target site sequence
gagggcagactagaggggct

SEQ ID NO: 6649 - DNA, 20 bp, Unknown
  Description of Unknown: gRNA target site sequence
agggcagactagaggggctg

SEQ ID NO: 6650 - DNA, 20 bp, Unknown
  Description of Unknown: gRNA target site sequence
tagaggggctggggtgcttc

SEQ ID NO: 6651 - DNA, 20 bp, Unknown
  Description of Unknown: gRNA target site sequence
gaggggctggggtgcttcca

SEQ ID NO: 6652 - DNA, 20 bp, Unknown
  Description of Unknown: gRNA target site sequence
ggctggggtgcttccagagc

SEQ ID NO: 6653 - DNA, 20 bp, Unknown
  Description of Unknown: gRNA target site sequence
ctggggtgcttccagagcta

SEQ ID NO: 6654 - DNA, 20 bp, Unknown
  Description of Unknown: gRNA target site sequence
tggggtgcttccagagctag

SEQ ID NO: 6655 - DNA, 20 bp, Unknown
  Description of Unknown: gRNA target site sequence
gtgcttccagagctagagga

SEQ ID NO: 6656 - DNA, 20 bp, Unknown
  Description of Unknown: gRNA target site sequence
gcttccagagctagaggaca

SEQ ID NO: 6657 - DNA, 20 bp, Unknown
  Description of Unknown: gRNA target site sequence
gagctagaggacagagatgc

SEQ ID NO: 6658 - DNA, 20 bp, Unknown
  Description of Unknown: gRNA target site sequence
agatgccggtcaccattccc

SEQ ID NO: 6659 - DNA, 20 bp, Unknown
  Description of Unknown: gRNA target site sequence
gatgccggtcaccattcccc

SEQ ID NO: 6660 - DNA, 20 bp, Unknown
  Description of Unknown: gRNA target site sequence
cggtcaccattccccaggtg

SEQ ID NO: 6661 - DNA, 20 bp, Unknown
  Description of Unknown: gRNA target site sequence
ggtcaccattccccaggtgc

SEQ ID NO: 6662 - DNA, 20 bp, Unknown
  Description of Unknown: gRNA target site sequence
accattccccaggtgcagga

SEQ ID NO: 6663 - DNA, 20 bp, Unknown
  Description of Unknown: gRNA target site sequence
cattccccaggtgcaggaca

SEQ ID NO: 6664 - DNA, 20 bp, Unknown
  Description of Unknown: gRNA target site sequence
ccaggtgcaggacagagccc

SEQ ID NO: 6665 - DNA, 20 bp, Unknown
  Description of Unknown: gRNA target site sequence
tgcaggacagagccctggac

SEQ ID NO: 6666 - DNA, 20 bp, Unknown
  Description of Unknown: gRNA target site sequence
caggacagagccctggactg

SEQ ID NO: 6667 - DNA, 20 bp, Unknown
  Description of Unknown: gRNA target site sequence
acagagccctggactggagc

SEQ ID NO: 6668 - DNA, 20 bp, Unknown
  Description of Unknown: gRNA target site sequence
cagagccctggactggagct

SEQ ID NO: 6669 - DNA, 20 bp, Unknown
  Description of Unknown: gRNA target site sequence
agagccctggactggagctg

SEQ ID NO: 6670 - DNA, 20 bp, Unknown
  Description of Unknown: gRNA target site sequence
gagccctggactggagctgg

SEQ ID NO: 6671 - DNA, 20 bp, Unknown
  Description of Unknown: gRNA target site sequence
agccctggactggagctggg

SEQ ID NO: 6672 - DNA, 20 bp, Unknown
  Description of Unknown: gRNA target site sequence
gggtccctgccctacgaccc

SEQ ID NO: 6673 - DNA, 20 bp, Unknown
  Description of Unknown: gRNA target site sequence
gtccctgccctacgaccctg

SEQ ID NO: 6674 - DNA, 20 bp, Unknown
  Description of Unknown: gRNA target site sequence
ctggagctcctgatcctgtg

SEQ ID NO: 6675 - DNA, 20 bp, Unknown
  Description of Unknown: gRNA target site sequence
tggagctcctgatcctgtgc

SEQ ID NO: 6676 - DNA, 20 bp, Unknown
  Description of Unknown: gRNA target site sequence
gagctcctgatcctgtgcag

SEQ ID NO: 6677 - DNA, 20 bp, Unknown
  Description of Unknown: gRNA target site sequence
agctcctgatcctgtgcagg

SEQ ID NO: 6678 - DNA, 20 bp, Unknown
  Description of Unknown: gRNA target site sequence
gctcctgatcctgtgcagga

SEQ ID NO: 6679 - DNA, 20 bp, Unknown
  Description of Unknown: gRNA target site sequence
ctcctgatcctgtgcaggag

SEQ ID NO: 6680 - DNA, 20 bp, Unknown
  Description of Unknown: gRNA target site sequence
gcaggaggggacacccaccc

SEQ ID NO: 6681 - DNA, 20 bp, Unknown
  Description of Unknown: gRNA target site sequence
caggaggggacacccacccc

SEQ ID NO: 6682 - DNA, 20 bp, Unknown
  Description of Unknown: gRNA target site sequence
ggggacacccaccccaggac

SEQ ID NO: 6683 - DNA, 20 bp, Unknown
  Description of Unknown: gRNA target site sequence
cacccaccccaggaccggct

SEQ ID NO: 6684 - DNA, 20 bp, Unknown
  Description of Unknown: gRNA target site sequence
ggctcagctcacccctgccc

SEQ ID NO: 6685 - DNA, 20 bp, Unknown
  Description of Unknown: gRNA target site sequence
gctcagctcacccctgcccc

SEQ ID NO: 6686 - DNA, 20 bp, Unknown
  Description of Unknown: gRNA target site sequence
ctcagctcacccctgccccg

SEQ ID NO: 6687 - DNA, 20 bp, Unknown
  Description of Unknown: gRNA target site sequence
acccctgccccggggcctcc

SEQ ID NO: 6688 - DNA, 20 bp, Unknown
  Description of Unknown: gRNA target site sequence
cccctgccccggggcctccg

SEQ ID NO: 6689 - DNA, 20 bp, Unknown
  Description of Unknown: gRNA target site sequence
gaggccgcacctgtcaccct

SEQ ID NO: 6690 - DNA, 20 bp, Unknown
  Description of Unknown: gRNA target site sequence
gtcaccctgagctctgcccg

SEQ ID NO: 6691 - DNA, 20 bp, Unknown
  Description of Unknown: gRNA target site sequence
tcaccctgagctctgcccgc

SEQ ID NO: 6692 - DNA, 20 bp, Unknown
  Description of Unknown: gRNA target site sequence
gctctctttgatctgcgcct

SEQ ID NO: 6693 - DNA, 20 bp, Unknown
  Description of Unknown: gRNA target site sequence
ctctctttgatctgcgcctt

SEQ ID NO: 6694 - DNA, 20 bp, Unknown
  Description of Unknown: gRNA target site sequence
tctctttgatctgcgccttg

SEQ ID NO: 6695 - DNA, 20 bp, Unknown
  Description of Unknown: gRNA target site sequence
ctctttgatctgcgccttgg

SEQ ID NO: 6696 - DNA, 20 bp, Unknown
  Description of Unknown: gRNA target site sequence
ttgatctgcgccttgggggc

SEQ ID NO: 6697 - DNA, 20 bp, Unknown
  Description of Unknown: gRNA target site sequence
tgatctgcgccttgggggcc

SEQ ID NO: 6698 - DNA, 20 bp, Unknown
  Description of Unknown: gRNA target site sequence
gatctgcgccttgggggcca

SEQ ID NO: 6699 - DNA, 20 bp, Unknown
  Description of Unknown: gRNA target site sequence
tctgcgccttgggggccagg

SEQ ID NO: 6700 - DNA, 20 bp, Unknown
  Description of Unknown: gRNA target site sequence
cgccttgggggccagggaga

SEQ ID NO: 6701 - DNA, 20 bp, Unknown
  Description of Unknown: gRNA target site sequence
gggccagggagatggcccca

SEQ ID NO: 6702 - DNA, 20 bp, Unknown
  Description of Unknown: gRNA target site sequence
gccagggagatggccccaca

SEQ ID NO: 6703 - DNA, 20 bp, Unknown
  Description of Unknown: gRNA target site sequence
ccagggagatggccccacag

SEQ ID NO: 6704 - DNA, 20 bp, Unknown
  Description of Unknown: gRNA target site sequence
gggagatggccccacagagg

SEQ ID NO: 6705 - DNA, 20 bp, Unknown
  Description of Unknown: gRNA target site sequence
ggagatggccccacagaggt

SEQ ID NO: 6706 - DNA, 20 bp, Unknown
  Description of Unknown: gRNA target site sequence
aggtgccgctgtcattgcgc

SEQ ID NO: 6707 - DNA, 20 bp, Unknown
  Description of Unknown: gRNA target site sequence
ggtgccgctgtcattgcgcc

SEQ ID NO: 6708 - DNA, 20 bp, Unknown
  Description of Unknown: gRNA target site sequence
gggccctgaccacgctcatg

SEQ ID NO: 6709 - DNA, 20 bp, Unknown
  Description of Unknown: gRNA target site sequence
ccctgaccacgctcatgtgg

SEQ ID NO: 6710 - DNA, 20 bp, Unknown
  Description of Unknown: gRNA target site sequence
catgtggaagtcacgcccgt

SEQ ID NO: 6711 - DNA, 20 bp, Unknown
  Description of Unknown: gRNA target site sequence
atgtggaagtcacgcccgtt

SEQ ID NO: 6712 - DNA, 20 bp, Unknown
  Description of Unknown: gRNA target site sequence
tggaagtcacgcccgttggg

SEQ ID NO: 6713 - DNA, 20 bp, Unknown
  Description of Unknown: gRNA target site sequence
cgttgggcagttgtgtgaca

SEQ ID NO: 6714 - DNA, 20 bp, Unknown
  Description of Unknown: gRNA target site sequence
tgggcagttgtgtgacacgg

SEQ ID NO: 6715 - DNA, 20 bp, Unknown
  Description of Unknown: gRNA target site sequence
gcagttgtgtgacacggaag

SEQ ID NO: 6716 - DNA, 20 bp, Unknown
  Description of Unknown: gRNA target site sequence
gttgtgtgacacggaagcgg

SEQ ID NO: 6717 - DNA, 20 bp, Unknown
  Description of Unknown: gRNA target site sequence
tgacacggaagcggcagtcc

SEQ ID NO: 6718 - DNA, 20 bp, Unknown
  Description of Unknown: gRNA target site sequence
acggaagcggcagtcctggc

SEQ ID NO: 6719 - DNA, 20 bp, Unknown
  Description of Unknown: gRNA target site sequence
cggaagcggcagtcctggcc

SEQ ID NO: 6720 - DNA, 20 bp, Unknown
  Description of Unknown: gRNA target site sequence
agcggcagtcctggccgggc

SEQ ID NO: 6721 - DNA, 20 bp, Unknown
  Description of Unknown: gRNA target site sequence
agtcctggccgggctggctg

SEQ ID NO: 6722 - DNA, 20 bp, Unknown
  Description of Unknown: gRNA target site sequence
gccgggctggctgcggtcct

SEQ ID NO: 6723 - DNA, 20 bp, Unknown
  Description of Unknown: gRNA target site sequence
ccgggctggctgcggtcctc

SEQ ID NO: 6724 - DNA, 20 bp, Unknown
  Description of Unknown: gRNA target site sequence
cgggctggctgcggtcctcg

SEQ ID NO: 6725 - DNA, 20 bp, Unknown
  Description of Unknown: gRNA target site sequence
gctggctgcggtcctcgggg

SEQ ID NO: 6726 - DNA, 20 bp, Unknown
  Description of Unknown: gRNA target site sequence
ctggctgcggtcctcgggga

SEQ ID NO: 6727 - DNA, 20 bp, Unknown
  Description of Unknown: gRNA target site sequence
gctgcggtcctcggggaagg

SEQ ID NO: 6728 - DNA, 20 bp, Unknown
  Description of Unknown: gRNA target site sequence
cggtcctcggggaaggcggc

SEQ ID NO: 6729 - DNA, 20 bp, Unknown
  Description of Unknown: gRNA target site sequence
aggcggccagcttgtccgtc

SEQ ID NO: 6730 - DNA, 20 bp, Unknown
  Description of Unknown: gRNA target site sequence
cagcttgtccgtctggttgc

SEQ ID NO: 6731 - DNA, 20 bp, Unknown
  Description of Unknown: gRNA target site sequence
agcttgtccgtctggttgct

SEQ ID NO: 6732 - DNA, 20 bp, Unknown
  Description of Unknown: gRNA target site sequence
gcttgtccgtctggttgctg

SEQ ID NO: 6733 - DNA, 20 bp, Unknown
  Description of Unknown: gRNA target site sequence
tctggttgctggggctcatg

SEQ ID NO: 6734 - DNA, 20 bp, Unknown
  Description of Unknown: gRNA target site sequence
tgctggggctcatgcggtac

SEQ ID NO: 6735 - DNA, 20 bp, Unknown
  Description of Unknown: gRNA target site sequence
gggctcatgcggtaccagtt

SEQ ID NO: 6736 - DNA, 20 bp, Unknown
  Description of Unknown: gRNA target site sequence
tgcggtaccagtttagcacg

SEQ ID NO: 6737 - DNA, 20 bp, Unknown
  Description of Unknown: gRNA target site sequence
cacgaagctctccgatgtgt

SEQ ID NO: 6738 - DNA, 20 bp, Unknown
  Description of Unknown: gRNA target site sequence
cgaagctctccgatgtgttg

SEQ ID NO: 6739 - DNA, 20 bp, Unknown
  Description of Unknown: gRNA target site sequence
agctctccgatgtgttggag

SEQ ID NO: 6740 - DNA, 20 bp, Unknown
  Description of Unknown: gRNA target site sequence
ccgatgtgttggagaagctg

SEQ ID NO: 6741 - DNA, 20 bp, Unknown
  Description of Unknown: gRNA target site sequence
cgatgtgttggagaagctgc

SEQ ID NO: 6742 - DNA, 20 bp, Unknown
  Description of Unknown: gRNA target site sequence
tgttggagaagctgcaggtg

SEQ ID NO: 6743 - DNA, 20 bp, Unknown
  Description of Unknown: gRNA target site sequence
gttggagaagctgcaggtga

SEQ ID NO: 6744 - DNA, 20 bp, Unknown
  Description of Unknown: gRNA target site sequence
ggagaagctgcaggtgaagg

SEQ ID NO: 6745 - DNA, 20 bp, Unknown
  Description of Unknown: gRNA target site sequence
gaaggtggcgttgtcccctt

SEQ ID NO: 6746 - DNA, 20 bp, Unknown
  Description of Unknown: gRNA target site sequence
ttgtccccttcggtcaccac

SEQ ID NO: 6747 - DNA, 20 bp, Unknown
  Description of Unknown: gRNA target site sequence
tccccttcggtcaccacgag

SEQ ID NO: 6748 - DNA, 20 bp, Unknown
  Description of Unknown: gRNA target site sequence
ccccttcggtcaccacgagc

SEQ ID NO: 6749 - DNA, 20 bp, Unknown
  Description of Unknown: gRNA target site sequence
cccttcggtcaccacgagca

SEQ ID NO: 6750 - DNA, 20 bp, Unknown
  Description of Unknown: gRNA target site sequence
tcggtcaccacgagcagggc

SEQ ID NO: 6751 - DNA, 20 bp, Unknown
  Description of Unknown: gRNA target site sequence
cggtcaccacgagcagggct

SEQ ID NO: 6752 - DNA, 20 bp, Unknown
  Description of Unknown: gRNA target site sequence
ggtcaccacgagcagggctg

SEQ ID NO: 6753 - DNA, 20 bp, Unknown
  Description of Unknown: gRNA target site sequence
tcaccacgagcagggctggg

SEQ ID NO: 6754 - DNA, 20 bp, Unknown
  Description of Unknown: gRNA target site sequence
ccacgagcagggctggggag

SEQ ID NO: 6755 - DNA, 20 bp, Unknown
  Description of Unknown: gRNA target site sequence
cacgagcagggctggggaga

SEQ ID NO: 6756 - DNA, 20 bp, Unknown
  Description of Unknown: gRNA target site sequence
gagcagggctggggagaagg

SEQ ID NO: 6757 - DNA, 20 bp, Unknown
  Description of Unknown: gRNA target site sequence
agcagggctggggagaaggt

SEQ ID NO: 6758 - DNA, 20 bp, Unknown
  Description of Unknown: gRNA target site sequence
gcagggctggggagaaggtg

SEQ ID NO: 6759 - DNA, 20 bp, Unknown
  Description of Unknown: gRNA target site sequence
cagggctggggagaaggtgg

SEQ ID NO: 6760 - DNA, 20 bp, Unknown
  Description of Unknown: gRNA target site sequence
agggctggggagaaggtggg

SEQ ID NO: 6761 - DNA, 20 bp, Unknown
  Description of Unknown: gRNA target site sequence
gggctggggagaaggtgggg

SEQ ID NO: 6762 - DNA, 20 bp, Unknown
  Description of Unknown: gRNA target site sequence
gggagaaggtgggggggttc

SEQ ID NO: 6763 - DNA, 20 bp, Unknown
  Description of Unknown: gRNA target site sequence
ggagaaggtgggggggttcc

SEQ ID NO: 6764 - DNA, 20 bp, Unknown
  Description of Unknown: gRNA target site sequence
gagaaggtgggggggttcca

SEQ ID NO: 6765 - DNA, 20 bp, Unknown
  Description of Unknown: gRNA target site sequence
ggggggttccagggcctgtc

SEQ ID NO: 6766 - DNA, 20 bp, Unknown
  Description of Unknown: gRNA target site sequence
gggggttccagggcctgtct

SEQ ID NO: 6767 - DNA, 20 bp, Unknown
  Description of Unknown: gRNA target site sequence
ggggttccagggcctgtctg

SEQ ID NO: 6768 - DNA, 20 bp, Unknown
  Description of Unknown: gRNA target site sequence
ggttccagggcctgtctggg

SEQ ID NO: 6769 - DNA, 20 bp, Unknown
  Description of Unknown: gRNA target site sequence
agggcctgtctggggagtct

SEQ ID NO: 6770 - DNA, 20 bp, Unknown
  Description of Unknown: gRNA target site sequence
ggcctgtctggggagtctga

SEQ ID NO: 6771 - DNA, 20 bp, Unknown
  Description of Unknown: gRNA target site sequence
tgtctggggagtctgagaga

SEQ ID NO: 6772 - DNA, 20 bp, Unknown
  Description of Unknown: gRNA target site sequence
tctggggagtctgagagatg

SEQ ID NO: 6773 - DNA, 20 bp, Unknown
  Description of Unknown: gRNA target site sequence
tggggagtctgagagatgga

SEQ ID NO: 6774 - DNA, 20 bp, Unknown
  Description of Unknown: gRNA target site sequence
gggagtctgagagatggaga

SEQ ID NO: 6775 - DNA, 20 bp, Unknown
  Description of Unknown: gRNA target site sequence
ggagtctgagagatggagag

SEQ ID NO: 6776 - DNA, 20 bp, Unknown
  Description of Unknown: gRNA target site sequence
tctgagagatggagagaggt

SEQ ID NO: 6777 - DNA, 20 bp, Unknown
  Description of Unknown: gRNA target site sequence
ctgagagatggagagaggtg

SEQ ID NO: 6778 - DNA, 20 bp, Unknown
  Description of Unknown: gRNA target site sequence
agagatggagagaggtgagg

SEQ ID NO: 6779 - DNA, 20 bp, Unknown
  Description of Unknown: gRNA target site sequence
gagatggagagaggtgagga

SEQ ID NO: 6780 - DNA, 20 bp, Unknown
  Description of Unknown: gRNA target site sequence
agatggagagaggtgaggaa

SEQ ID NO: 6781 - DNA, 20 bp, Unknown
  Description of Unknown: gRNA target site sequence
gatggagagaggtgaggaag

SEQ ID NO: 6782 - DNA, 20 bp, Unknown
  Description of Unknown: gRNA target site sequence
gagagaggtgaggaaggggc

SEQ ID NO: 6783 - DNA, 20 bp, Unknown
  Description of Unknown: gRNA target site sequence
agagaggtgaggaaggggct

SEQ ID NO: 6784 - DNA, 20 bp, Unknown
  Description of Unknown: gRNA target site sequence
gaggtgaggaaggggctggg

SEQ ID NO: 6785 - DNA, 20 bp, Unknown
  Description of Unknown: gRNA target site sequence
aggggctgggtggccccaca

SEQ ID NO: 6786 - DNA, 20 bp, Unknown
  Description of Unknown: gRNA target site sequence
gtggccccacaaagcctccc

SEQ ID NO: 6787 - DNA, 20 bp, Unknown
  Description of Unknown: gRNA target site sequence
ggccacctgctcacatccct

SEQ ID NO: 6788 - DNA, 20 bp, Unknown
  Description of Unknown: gRNA target site sequence
gccacctgctcacatccctc

SEQ ID NO: 6789 - DNA, 20 bp, Unknown
  Description of Unknown: gRNA target site sequence
acctgctcacatccctcggg

SEQ ID NO: 6790 - DNA, 20 bp, Unknown
  Description of Unknown: gRNA target site sequence
gctcacatccctcgggcagc

SEQ ID NO: 6791 - DNA, 20 bp, Unknown
  Description of Unknown: gRNA target site sequence
ctcacatccctcgggcagca

SEQ ID NO: 6792 - DNA, 20 bp, Unknown
  Description of Unknown: gRNA target site sequence
tcacatccctcgggcagcaa

SEQ ID NO: 6793 - DNA, 20 bp, Unknown
  Description of Unknown: gRNA target site sequence
ccctcgggcagcaagggctc

SEQ ID NO: 6794 - DNA, 20 bp, Unknown
  Description of Unknown: gRNA target site sequence
tcgggcagcaagggctctgg

SEQ ID NO: 6795 - DNA, 20 bp, Unknown
  Description of Unknown: gRNA target site sequence
cgggcagcaagggctctgga

SEQ ID NO: 6796 - DNA, 20 bp, Unknown
  Description of Unknown: gRNA target site sequence
gggcagcaagggctctggaa

SEQ ID NO: 6797 - DNA, 20 bp, Unknown
  Description of Unknown: gRNA target site sequence
gggctctggaagggccaccc

SEQ ID NO: 6798 - DNA, 20 bp, Unknown
  Description of Unknown: gRNA target site sequence
tctggaagggccaccccagc

SEQ ID NO: 6799 - DNA, 20 bp, Unknown
  Description of Unknown: gRNA target site sequence
accccagctggaatgtcatt

SEQ ID NO: 6800 - DNA, 20 bp, Unknown
  Description of Unknown: gRNA target site sequence
ccagctggaatgtcattgag

SEQ ID NO: 6801 - DNA, 20 bp, Unknown
  Description of Unknown: gRNA target site sequence
tgtcattgagaagtctctgc

SEQ ID NO: 6802 - DNA, 20 bp, Unknown
  Description of Unknown: gRNA target site sequence
gtcattgagaagtctctgct

SEQ ID NO: 6803 - DNA, 20 bp, Unknown
  Description of Unknown: gRNA target site sequence
tcattgagaagtctctgctg

SEQ ID NO: 6804 - DNA, 20 bp, Unknown
  Description of Unknown: gRNA target site sequence
ctgctggggcctctgccacc

SEQ ID NO: 6805 - DNA, 20 bp, Unknown
  Description of Unknown: gRNA target site sequence
tgctggggcctctgccaccc

SEQ ID NO: 6806 - DNA, 20 bp, Unknown
  Description of Unknown: gRNA target site sequence
gctggggcctctgccacccg

SEQ ID NO: 6807 - DNA, 20 bp, Unknown
  Description of Unknown: gRNA target site sequence
gggcctctgccacccgggga

SEQ ID NO: 6808 - DNA, 20 bp, Unknown
  Description of Unknown: gRNA target site sequence
ggcctctgccacccggggat

SEQ ID NO: 6809 - DNA, 20 bp, Unknown
  Description of Unknown: gRNA target site sequence
tgccacccggggatgggcac

SEQ ID NO: 6810 - DNA, 20 bp, Unknown
  Description of Unknown: gRNA target site sequence
atgggcactggcctccactg

SEQ ID NO: 6811 - DNA, 20 bp, Unknown
  Description of Unknown: gRNA target site sequence
gggcactggcctccactgca

SEQ ID NO: 6812 - DNA, 20 bp, Unknown
  Description of Unknown: gRNA target site sequence
agagcctcttccttctacgt

SEQ ID NO: 6813 - DNA, 20 bp, Unknown
  Description of Unknown: gRNA target site sequence
gagcctcttccttctacgtg

SEQ ID NO: 6814 - DNA, 20 bp, Unknown
  Description of Unknown: gRNA target site sequence
cttccttctacgtgaggctg

SEQ ID NO: 6815 - DNA, 20 bp, Unknown
  Description of Unknown: gRNA target site sequence
gtgaggctgcagcttctgca

SEQ ID NO: 6816 - DNA, 20 bp, Unknown
  Description of Unknown: gRNA target site sequence
tgcagcttctgcacagcacc

SEQ ID NO: 6817 - DNA, 20 bp, Unknown
  Description of Unknown: gRNA target site sequence
cacagcacctggctctgact

SEQ ID NO: 6818 - DNA, 20 bp, Unknown
  Description of Unknown: gRNA target site sequence
acagcacctggctctgactt

SEQ ID NO: 6819 - DNA, 20 bp, Unknown
  Description of Unknown: gRNA target site sequence
ggtctccctgatttcctact

SEQ ID NO: 6820 - DNA, 20 bp, Unknown
  Description of Unknown: gRNA target site sequence
tctccctgatttcctactaa

SEQ ID NO: 6821 - DNA, 20 bp, Unknown
  Description of Unknown: gRNA target site sequence
ccttcacccccttccccgtt

SEQ ID NO: 6822 - DNA, 20 bp, Unknown
  Description of Unknown: gRNA target site sequence
cttcacccccttccccgttg

SEQ ID NO: 6823 - DNA, 20 bp, Unknown
  Description of Unknown: gRNA target site sequence
acccccttccccgttgaggc

SEQ ID NO: 6824 - DNA, 20 bp, Unknown
  Description of Unknown: gRNA target site sequence
cccgttgaggccagttcccc

SEQ ID NO: 6825 - DNA, 20 bp, Unknown
  Description of Unknown: gRNA target site sequence
ttgaggccagttcccccaga

SEQ ID NO: 6826 - DNA, 20 bp, Unknown
  Description of Unknown: gRNA target site sequence
tgaggccagttcccccagaa

SEQ ID NO: 6827 - DNA, 20 bp, Unknown
  Description of Unknown: gRNA target site sequence
gaggccagttcccccagaaa

SEQ ID NO: 6828 - DNA, 20 bp, Unknown
  Description of Unknown: gRNA target site sequence
ttcccccagaaagggctgtt

SEQ ID NO: 6829 - DNA, 20 bp, Unknown
  Description of Unknown: gRNA target site sequence
tcccccagaaagggctgttt

SEQ ID NO: 6830 - DNA, 20 bp, Unknown
  Description of Unknown: gRNA target site sequence
cccccagaaagggctgtttg

SEQ ID NO: 6831 - DNA, 20 bp, Unknown
  Description of Unknown: gRNA target site sequence
ccccagaaagggctgtttgg

SEQ ID NO: 6832 - DNA, 20 bp, Unknown
  Description of Unknown: gRNA target site sequence
gtttgggggctacccatccc

SEQ ID NO: 6833 - DNA, 20 bp, Unknown
  Description of Unknown: gRNA target site sequence
catccccagcccctgaccct

SEQ ID NO: 6834 - DNA, 20 bp, Unknown
  Description of Unknown: gRNA target site sequence
atccccagcccctgaccctt

SEQ ID NO: 6835 - DNA, 20 bp, Unknown
  Description of Unknown: gRNA target site sequence
cccctgacccttgggcatcc

SEQ ID NO: 6836 - DNA, 20 bp, Unknown
  Description of Unknown: gRNA target site sequence
gacccttgggcatcctggcc

SEQ ID NO: 6837 - DNA, 20 bp, Unknown
  Description of Unknown: gRNA target site sequence
tggtcctgtctgcactgctc

SEQ ID NO: 6838 - DNA, 20 bp, Unknown
  Description of Unknown: gRNA target site sequence
ctgtctgcactgctctggca

SEQ ID NO: 6839 - DNA, 20 bp, Unknown
  Description of Unknown: gRNA target site sequence
tgtctgcactgctctggcac

SEQ ID NO: 6840 - DNA, 20 bp, Unknown
  Description of Unknown: gRNA target site sequence
gtctgcactgctctggcaca

SEQ ID NO: 6841 - DNA, 20 bp, Unknown
  Description of Unknown: gRNA target site sequence
tctgcactgctctggcacag

SEQ ID NO: 6842 - DNA, 20 bp, Unknown
  Description of Unknown: gRNA target site sequence
tgcactgctctggcacaggg

SEQ ID NO: 6843 - DNA, 20 bp, Unknown
  Description of Unknown: gRNA target site sequence
ctggcacaggggagtgtaac

SEQ ID NO: 6844 - DNA, 20 bp, Unknown
  Description of Unknown: gRNA target site sequence
acaggggagtgtaactggtc

SEQ ID NO: 6845 - DNA, 20 bp, Unknown
  Description of Unknown: gRNA target site sequence
caggggagtgtaactggtct

SEQ ID NO: 6846 - DNA, 20 bp, Unknown
  Description of Unknown: gRNA target site sequence
gggagtgtaactggtctggg

SEQ ID NO: 6847 - DNA, 20 bp, Unknown
  Description of Unknown: gRNA target site sequence
ggagtgtaactggtctgggt

SEQ ID NO: 6848 - DNA, 20 bp, Unknown
  Description of Unknown: gRNA target site sequence
gtgtaactggtctgggtggg

SEQ ID NO: 6849 - DNA, 20 bp, Unknown
  Description of Unknown: gRNA target site sequence
tgtaactggtctgggtgggt

SEQ ID NO: 6850 - DNA, 20 bp, Unknown
  Description of Unknown: gRNA target site sequence
gtaactggtctgggtgggtg

SEQ ID NO: 6851 - DNA, 20 bp, Unknown
  Description of Unknown: gRNA target site sequence
taactggtctgggtgggtgg

SEQ ID NO: 6852 - DNA, 20 bp, Unknown
  Description of Unknown: gRNA target site sequence
aactggtctgggtgggtggg

SEQ ID NO: 6853 - DNA, 20 bp, Unknown
  Description of Unknown: gRNA target site sequence
ggtgggtggggggctgccca

SEQ ID NO: 6854 - DNA, 20 bp, Unknown
  Description of Unknown: gRNA target site sequence
tgggtggggggctgcccatg

SEQ ID NO: 6855 - DNA, 20 bp, Unknown
  Description of Unknown: gRNA target site sequence
ggggctgcccatggagaccc

SEQ ID NO: 6856 - DNA, 20 bp, Unknown
  Description of Unknown: gRNA target site sequence
gcccatggagaccccagccc

SEQ ID NO: 6857 - DNA, 20 bp, Unknown
  Description of Unknown: gRNA target site sequence
cccatggagaccccagccct

SEQ ID NO: 6858 - DNA, 20 bp, Unknown
  Description of Unknown: gRNA target site sequence
catggagaccccagccctgg

SEQ ID NO: 6859 - DNA, 20 bp, Unknown
  Description of Unknown: gRNA target site sequence
atggagaccccagccctggg

SEQ ID NO: 6860 - DNA, 20 bp, Unknown
  Description of Unknown: gRNA target site sequence
ggagaccccagccctgggag

SEQ ID NO: 6861 - DNA, 20 bp, Unknown
  Description of Unknown: gRNA target site sequence
ccccagccctgggaggagtg

SEQ ID NO: 6862 - DNA, 20 bp, Unknown
  Description of Unknown: gRNA target site sequence
ctgggaggagtgtggcccct

SEQ ID NO: 6863 - DNA, 20 bp, Unknown
  Description of Unknown: gRNA target site sequence
ggaggagtgtggccccttgg

SEQ ID NO: 6864 - DNA, 20 bp, Unknown
  Description of Unknown: gRNA target site sequence
gaggagtgtggccccttggc

SEQ ID NO: 6865 - DNA, 20 bp, Unknown
  Description of Unknown: gRNA target site sequence
gtgtggccccttggcaggct

SEQ ID NO: 6866 - DNA, 20 bp, Unknown
  Description of Unknown: gRNA target site sequence
tgtggccccttggcaggctc

SEQ ID NO: 6867 - DNA, 20 bp, Unknown
  Description of Unknown: gRNA target site sequence
gtggccccttggcaggctca

SEQ ID NO: 6868 - DNA, 20 bp, Unknown
  Description of Unknown: gRNA target site sequence
cccttggcaggctcagggtc

SEQ ID NO: 6869 - DNA, 20 bp, Unknown
  Description of Unknown: gRNA target site sequence
tccagtctttgccccctttt

SEQ ID NO: 6870 - DNA, 20 bp, Unknown
  Description of Unknown: gRNA target site sequence
ccagtctttgcccccttttc

SEQ ID NO: 6871 - DNA, 20 bp, Unknown
  Description of Unknown: gRNA target site sequence
ctttgcccccttttcaggac

SEQ ID NO: 6872 - DNA, 20 bp, Unknown
  Description of Unknown: gRNA target site sequence
cccccttttcaggacaagct

SEQ ID NO: 6873 - DNA, 20 bp, Unknown
  Description of Unknown: gRNA target site sequence
cccttttcaggacaagctcg

SEQ ID NO: 6874 - DNA, 20 bp, Unknown
  Description of Unknown: gRNA target site sequence
tttcaggacaagctcggagc

SEQ ID NO: 6875 - DNA, 20 bp, Unknown
  Description of Unknown: gRNA target site sequence
ttcaggacaagctcggagct

SEQ ID NO: 6876 - DNA, 20 bp, Unknown
  Description of Unknown: gRNA target site sequence
agctcggagctgggaccacg

SEQ ID NO: 6877 - DNA, 20 bp, Unknown
  Description of Unknown: gRNA target site sequence
ggagctgggaccacgtggta

SEQ ID NO: 6878 - DNA, 20 bp, Unknown
  Description of Unknown: gRNA target site sequence
gagctgggaccacgtggtat

SEQ ID NO: 6879 - DNA, 20 bp, Unknown
  Description of Unknown: gRNA target site sequence
tggtatgggcattgctgccc

SEQ ID NO: 6880 - DNA, 20 bp, Unknown
  Description of Unknown: gRNA target site sequence
ggtatgggcattgctgccct

SEQ ID NO: 6881 - DNA, 20 bp, Unknown
  Description of Unknown: gRNA target site sequence
atgggcattgctgccctggg

SEQ ID NO: 6882 - DNA, 20 bp, Unknown
  Description of Unknown: gRNA target site sequence
ggcattgctgccctgggcag

SEQ ID NO: 6883 - DNA, 20 bp, Unknown
  Description of Unknown: gRNA target site sequence
gcattgctgccctgggcagt

SEQ ID NO: 6884 - DNA, 20 bp, Unknown
  Description of Unknown: gRNA target site sequence
ttgctgccctgggcagtggg

SEQ ID NO: 6885 - DNA, 20 bp, Unknown
  Description of Unknown: gRNA target site sequence
ctgccctgggcagtgggcag

SEQ ID NO: 6886 - DNA, 20 bp, Unknown
  Description of Unknown: gRNA target site sequence
tgccctgggcagtgggcagt

SEQ ID NO: 6887 - DNA, 20 bp, Unknown
  Description of Unknown: gRNA target site sequence
gccctgggcagtgggcagtg

SEQ ID NO: 6888 - DNA, 20 bp, Unknown
  Description of Unknown: gRNA target site sequence
agtggggcctccacattttc

SEQ ID NO: 6889 - DNA, 20 bp, Unknown
  Description of Unknown: gRNA target site sequence
gggcctccacattttccagc

SEQ ID NO: 6890 - DNA, 20 bp, Unknown
  Description of Unknown: gRNA target site sequence
ctccacattttccagcaaga

SEQ ID NO: 6891 - DNA, 20 bp, Unknown
  Description of Unknown: gRNA target site sequence
cacattttccagcaagacag

SEQ ID NO: 6892 - DNA, 20 bp, Unknown
  Description of Unknown: gRNA target site sequence
acattttccagcaagacagt

SEQ ID NO: 6893 - DNA, 20 bp, Unknown
  Description of Unknown: gRNA target site sequence
cattttccagcaagacagtg

SEQ ID NO: 6894 - DNA, 20 bp, Unknown
  Description of Unknown: gRNA target site sequence
tccagcaagacagtggggac

SEQ ID NO: 6895 - DNA, 20 bp, Unknown
  Description of Unknown: gRNA target site sequence
cagcaagacagtggggacta

SEQ ID NO: 6896 - DNA, 20 bp, Unknown
  Description of Unknown: gRNA target site sequence
acagtggggactagagctca

SEQ ID NO: 6897 - DNA, 20 bp, Unknown
  Description of Unknown: gRNA target site sequence
ggggactagagctcacagca

SEQ ID NO: 6898 - DNA, 20 bp, Unknown
  Description of Unknown: gRNA target site sequence
agctcacagcaaagatgctt

SEQ ID NO: 6899 - DNA, 20 bp, Unknown
  Description of Unknown: gRNA target site sequence
ctcacagcaaagatgcttca

SEQ ID NO: 6900 - DNA, 20 bp, Unknown
  Description of Unknown: gRNA target site sequence
agcaaagatgcttcagagac

SEQ ID NO: 6901 - DNA, 20 bp, Unknown
  Description of Unknown: gRNA target site sequence
aagatgcttcagagacgaga

SEQ ID NO: 6902 - DNA, 20 bp, Unknown
  Description of Unknown: gRNA target site sequence
agatgcttcagagacgagat

SEQ ID NO: 6903 - DNA, 20 bp, Unknown
  Description of Unknown: gRNA target site sequence
gacgagatgggccattgact

SEQ ID NO: 6904 - DNA, 20 bp, Unknown
  Description of Unknown: gRNA target site sequence
atgggccattgactcggatg

SEQ ID NO: 6905 - DNA, 20 bp, Unknown
  Description of Unknown: gRNA target site sequence
gccattgactcggatgtgga

SEQ ID NO: 6906 - DNA, 20 bp, Unknown
  Description of Unknown: gRNA target site sequence
gactcggatgtggacagaca

SEQ ID NO: 6907 - DNA, 20 bp, Unknown
  Description of Unknown: gRNA target site sequence
actcggatgtggacagacac

SEQ ID NO: 6908 - DNA, 20 bp, Unknown
  Description of Unknown: gRNA target site sequence
ctcggatgtggacagacacg

SEQ ID NO: 6909 - DNA, 20 bp, Unknown
  Description of Unknown: gRNA target site sequence
agacacggggcccccgaccc

SEQ ID NO: 6910 - DNA, 20 bp, Unknown
  Description of Unknown: gRNA target site sequence
gacacggggcccccgaccct

SEQ ID NO: 6911 - DNA, 20 bp, Unknown
  Description of Unknown: gRNA target site sequence
gcccccgaccctgggctccc

SEQ ID NO: 6912 - DNA, 20 bp, Unknown
  Description of Unknown: gRNA target site sequence
cgaccctgggctcccaagac

SEQ ID NO: 6913 - DNA, 20 bp, Unknown
  Description of Unknown: gRNA target site sequence
gaccctgggctcccaagaca

SEQ ID NO: 6914 - DNA, 20 bp, Unknown
  Description of Unknown: gRNA target site sequence
ctcctgaaacatatgcctgc

SEQ ID NO: 6915 - DNA, 20 bp, Unknown
  Description of Unknown: gRNA target site sequence
tcctgaaacatatgcctgcc

SEQ ID NO: 6916 - DNA, 20 bp, Unknown
  Description of Unknown: gRNA target site sequence
cctgaaacatatgcctgcca

SEQ ID NO: 6917 - DNA, 20 bp, Unknown
  Description of Unknown: gRNA target site sequence
aaacatatgcctgccagggt

SEQ ID NO: 6918 - DNA, 20 bp, Unknown
  Description of Unknown: gRNA target site sequence
aacatatgcctgccagggtc

SEQ ID NO: 6919 - DNA, 20 bp, Unknown
  Description of Unknown: gRNA target site sequence
acatatgcctgccagggtca

SEQ ID NO: 6920 - DNA, 20 bp, Unknown
  Description of Unknown: gRNA target site sequence
tgcctgccagggtcagggct

SEQ ID NO: 6921 - DNA, 20 bp, Unknown
  Description of Unknown: gRNA target site sequence
gcctgccagggtcagggctt

SEQ ID NO: 6922 - DNA, 20 bp, Unknown
  Description of Unknown: gRNA target site sequence
cagggcttgggatacccgca

SEQ ID NO: 6923 - DNA, 20 bp, Unknown
  Description of Unknown: gRNA target site sequence
gggatacccgcatggcaacg

SEQ ID NO: 6924 - DNA, 20 bp, Unknown
  Description of Unknown: gRNA target site sequence
ggatacccgcatggcaacgt

SEQ ID NO: 6925 - DNA, 20 bp, Unknown
  Description of Unknown: gRNA target site sequence
gatacccgcatggcaacgtg

SEQ ID NO: 6926 - DNA, 20 bp, Unknown
  Description of Unknown: gRNA target site sequence
atacccgcatggcaacgtgg

SEQ ID NO: 6927 - DNA, 20 bp, Unknown
  Description of Unknown: gRNA target site sequence
gcatggcaacgtgggggtcg

SEQ ID NO: 6928 - DNA, 20 bp, Unknown
  Description of Unknown: gRNA target site sequence
gggggtcgcggctcttccgc

SEQ ID NO: 6929 - DNA, 20 bp, Unknown
  Description of Unknown: gRNA target site sequence
ggggtcgcggctcttccgcc

SEQ ID NO: 6930 - DNA, 20 bp, Unknown
  Description of Unknown: gRNA target site sequence
gtcgcggctcttccgccagg

SEQ ID NO: 6931 - DNA, 20 bp, Unknown
  Description of Unknown: gRNA target site sequence
cgcggctcttccgccaggcg

SEQ ID NO: 6932 - DNA, 20 bp, Unknown
  Description of Unknown: gRNA target site sequence
gcggctcttccgccaggcgg

SEQ ID NO: 6933 - DNA, 20 bp, Unknown
  Description of Unknown: gRNA target site sequence
gccaggcggaggcaccaaca

SEQ ID NO: 6934 - DNA, 20 bp, Unknown
  Description of Unknown: gRNA target site sequence
ccaggcggaggcaccaacac

SEQ ID NO: 6935 - DNA, 20 bp, Unknown
  Description of Unknown: gRNA target site sequence
aggcaccaacacaggcgctt

SEQ ID NO: 6936 - DNA, 20 bp, Unknown
  Description of Unknown: gRNA target site sequence
caacacaggcgcttaagatc

SEQ ID NO: 6937 - DNA, 20 bp, Unknown
  Description of Unknown: gRNA target site sequence
aacacaggcgcttaagatcc

SEQ ID NO: 6938 - DNA, 20 bp, Unknown
  Description of Unknown: gRNA target site sequence
ggcgcttaagatccaggccc

SEQ ID NO: 6939 - DNA, 20 bp, Unknown
  Description of Unknown: gRNA target site sequence
aggcccgagatgccatgcaa

SEQ ID NO: 6940 - DNA, 20 bp, Unknown
  Description of Unknown: gRNA target site sequence
ggcccgagatgccatgcaac

SEQ ID NO: 6941 - DNA, 20 bp, Unknown
  Description of Unknown: gRNA target site sequence
gcccgagatgccatgcaacg

SEQ ID NO: 6942 - DNA, 20 bp, Unknown
  Description of Unknown: gRNA target site sequence
atgcaacggggtgattttcc

SEQ ID NO: 6943 - DNA, 20 bp, Unknown
  Description of Unknown: gRNA target site sequence
tgattttcccggctcaccca

SEQ ID NO: 6944 - DNA, 20 bp, Unknown
  Description of Unknown: gRNA target site sequence
gattttcccggctcacccac

SEQ ID NO: 6945 - DNA, 20 bp, Unknown
  Description of Unknown: gRNA target site sequence
cacccacaggtcccatgcca

SEQ ID NO: 6946 - DNA, 20 bp, Unknown
  Description of Unknown: gRNA target site sequence
acccacaggtcccatgccac

SEQ ID NO: 6947 - DNA, 20 bp, Unknown
  Description of Unknown: gRNA target site sequence
cccacaggtcccatgccaca

SEQ ID NO: 6948 - DNA, 20 bp, Unknown
  Description of Unknown: gRNA target site sequence
gccacagggttccccaaaca

SEQ ID NO: 6949 - DNA, 20 bp, Unknown
  Description of Unknown: gRNA target site sequence
gggttccccaaacatggcgc

SEQ ID NO: 6950 - DNA, 20 bp, Unknown
  Description of Unknown: gRNA target site sequence
tggcgccagccccacactgt

SEQ ID NO: 6951 - DNA, 20 bp, Unknown
  Description of Unknown: gRNA target site sequence
cagccccacactgtcagacc

SEQ ID NO: 6952 - DNA, 20 bp, Unknown
  Description of Unknown: gRNA target site sequence
agacccagtgcactgtcact

SEQ ID NO: 6953 - DNA, 20 bp, Unknown
  Description of Unknown: gRNA target site sequence
actgtcactcagttccgtct

SEQ ID NO: 6954 - DNA, 20 bp, Unknown
  Description of Unknown: gRNA target site sequence
ctgtcactcagttccgtctc

SEQ ID NO: 6955 - DNA, 20 bp, Unknown
  Description of Unknown: gRNA target site sequence
actcagttccgtctcaggcc

SEQ ID NO: 6956 - DNA, 20 bp, Unknown
  Description of Unknown: gRNA target site sequence
ctcagttccgtctcaggcct

SEQ ID NO: 6957 - DNA, 20 bp, Unknown
  Description of Unknown: gRNA target site sequence
ttccgtctcaggcctgggca

SEQ ID NO: 6958 - DNA, 20 bp, Unknown
  Description of Unknown: gRNA target site sequence
caggcctgggcacggccccc

SEQ ID NO: 6959 - DNA, 20 bp, Unknown
  Description of Unknown: gRNA target site sequence
cctgggcacggccccccagc

SEQ ID NO: 6960 - DNA, 20 bp, Unknown
  Description of Unknown: gRNA target site sequence
ctgggcacggccccccagcg

SEQ ID NO: 6961 - DNA, 20 bp, Unknown
  Description of Unknown: gRNA target site sequence
ggccccccagcgaggtgaca

SEQ ID NO: 6962 - DNA, 20 bp, Unknown
  Description of Unknown: gRNA target site sequence
ccccccagcgaggtgacaca

SEQ ID NO: 6963 - DNA, 20 bp, Unknown
  Description of Unknown: gRNA target site sequence
cagcgaggtgacacagagac

SEQ ID NO: 6964 - DNA, 20 bp, Unknown
  Description of Unknown: gRNA target site sequence
agcgaggtgacacagagacc

SEQ ID NO: 6965 - DNA, 20 bp, Unknown
  Description of Unknown: gRNA target site sequence
gtgacacagagaccaggccc

SEQ ID NO: 6966 - DNA, 20 bp, Unknown
  Description of Unknown: gRNA target site sequence
agaccaggccctggttgcca

SEQ ID NO: 6967 - DNA, 20 bp, Unknown
  Description of Unknown: gRNA target site sequence
ggccctggttgccacagctg

SEQ ID NO: 6968 - DNA, 20 bp, Unknown
  Description of Unknown: gRNA target site sequence
gctgcggtccctctgcttcc

SEQ ID NO: 6969 - DNA, 20 bp, Unknown
  Description of Unknown: gRNA target site sequence
ctgcggtccctctgcttcct

SEQ ID NO: 6970 - DNA, 20 bp, Unknown
  Description of Unknown: gRNA target site sequence
ggtccctctgcttcctggga

SEQ ID NO: 6971 - DNA, 20 bp, Unknown
  Description of Unknown: gRNA target site sequence
gtccctctgcttcctgggac

SEQ ID NO: 6972 - DNA, 20 bp, Unknown
  Description of Unknown: gRNA target site sequence
cctctgcttcctgggacagg

SEQ ID NO: 6973 - DNA, 20 bp, Unknown
  Description of Unknown: gRNA target site sequence
cctgggacaggcggcctccg

SEQ ID NO: 6974 - DNA, 20 bp, Unknown
  Description of Unknown: gRNA target site sequence
gggacaggcggcctccgtgg

SEQ ID NO: 6975 - DNA, 20 bp, Unknown
  Description of Unknown: gRNA target site sequence
ggacaggcggcctccgtggc

SEQ ID NO: 6976 - DNA, 20 bp, Unknown
  Description of Unknown: gRNA target site sequence
caggcggcctccgtggcagg

SEQ ID NO: 6977 - DNA, 20 bp, Unknown
  Description of Unknown: gRNA target site sequence
gcggcctccgtggcaggcgg

SEQ ID NO: 6978 - DNA, 20 bp, Unknown
  Description of Unknown: gRNA target site sequence
gcaggcggtggtgatgactc

SEQ ID NO: 6979 - DNA, 20 bp, Unknown
  Description of Unknown: gRNA target site sequence
caggcggtggtgatgactca

SEQ ID NO: 6980 - DNA, 20 bp, Unknown
  Description of Unknown: gRNA target site sequence
ggcggtggtgatgactcaag

SEQ ID NO: 6981 - DNA, 20 bp, Unknown
  Description of Unknown: gRNA target site sequence
gtgatgactcaaggagcaac

SEQ ID NO: 6982 - DNA, 20 bp, Unknown
  Description of Unknown: gRNA target site sequence
gactcaaggagcaaccagct

SEQ ID NO: 6983 - DNA, 20 bp, Unknown
  Description of Unknown: gRNA target site sequence
ctcaaggagcaaccagctca

SEQ ID NO: 6984 - DNA, 20 bp, Unknown
  Description of Unknown: gRNA target site sequence
tcaaggagcaaccagctcag

SEQ ID NO: 6985 - DNA, 20 bp, Unknown
  Description of Unknown: gRNA target site sequence
aaggagcaaccagctcagag

SEQ ID NO: 6986 - DNA, 20 bp, Unknown
  Description of Unknown: gRNA target site sequence
aggagcaaccagctcagagg

SEQ ID NO: 6987 - DNA, 20 bp, Unknown
  Description of Unknown: gRNA target site sequence
gagcaaccagctcagaggag

SEQ ID NO: 6988 - DNA, 20 bp, Unknown
  Description of Unknown: gRNA target site sequence
agcaaccagctcagaggagg

SEQ ID NO: 6989 - DNA, 20 bp, Unknown
  Description of Unknown: gRNA target site sequence
gcaaccagctcagaggagga

SEQ ID NO: 6990 - DNA, 20 bp, Unknown
  Description of Unknown: gRNA target site sequence
caaccagctcagaggaggag

SEQ ID NO: 6991 - DNA, 20 bp, Unknown
  Description of Unknown: gRNA target site sequence
aaccagctcagaggaggagg

SEQ ID NO: 6992 - DNA, 20 bp, Unknown
  Description of Unknown: gRNA target site sequence
ctgctgccctcgtgtccctg

SEQ ID NO: 6993 - DNA, 20 bp, Unknown
  Description of Unknown: gRNA target site sequence
tgccctcgtgtccctgcagc

SEQ ID NO: 6994 - DNA, 20 bp, Unknown
  Description of Unknown: gRNA target site sequence
gccctcgtgtccctgcagcc

SEQ ID NO: 6995 - DNA, 20 bp, Unknown
  Description of Unknown: gRNA target site sequence
tcgtgtccctgcagccaggc

SEQ ID NO: 6996 - DNA, 20 bp, Unknown
  Description of Unknown: gRNA target site sequence
cctgcagccaggctggccca

SEQ ID NO: 6997 - DNA, 20 bp, Unknown
  Description of Unknown: gRNA target site sequence
caggctggcccacggcgtgc

SEQ ID NO: 6998 - DNA, 20 bp, Unknown
  Description of Unknown: gRNA target site sequence
ctggcccacggcgtgctggc

SEQ ID NO: 6999 - DNA, 20 bp, Unknown
  Description of Unknown: gRNA target site sequence
acggcgtgctggctggacac

SEQ ID NO: 7000 - DNA, 20 bp, Unknown
  Description of Unknown: gRNA target site sequence
ggcgtgctggctggacacca

SEQ ID NO: 7001 - DNA, 20 bp, Unknown
  Description of Unknown: gRNA target site sequence
gcgtgctggctggacaccag

SEQ ID NO: 7002 - DNA, 20 bp, Unknown
  Description of Unknown: gRNA target site sequence
tgctggctggacaccagagg

SEQ ID NO: 7003 - DNA, 20 bp, Unknown
  Description of Unknown: gRNA target site sequence
gctggctggacaccagaggt

SEQ ID NO: 7004 - DNA, 20 bp, Unknown
  Description of Unknown: gRNA target site sequence
ggctggacaccagaggtggg

SEQ ID NO: 7005 - DNA, 20 bp, Unknown
  Description of Unknown: gRNA target site sequence
gctggacaccagaggtgggt

SEQ ID NO: 7006 - DNA, 20 bp, Unknown
  Description of Unknown: gRNA target site sequence
gggtgggtctgtcatgtgac

SEQ ID NO: 7007 - DNA, 20 bp, Unknown
  Description of Unknown: gRNA target site sequence
ggtgggtctgtcatgtgacc

SEQ ID NO: 7008 - DNA, 20 bp, Unknown
  Description of Unknown: gRNA target site sequence
atgtgaccaggaccaactcc

SEQ ID NO: 7009 - DNA, 20 bp, Unknown
  Description of Unknown: gRNA target site sequence
actcctagtgccaacctcac

SEQ ID NO: 7010 - DNA, 20 bp, Unknown
  Description of Unknown: gRNA target site sequence
ctcctagtgccaacctcact

SEQ ID NO: 7011 - DNA, 20 bp, Unknown
  Description of Unknown: gRNA target site sequence
aacctcactgggcaccctcc

SEQ ID NO: 7012 - DNA, 20 bp, Unknown
  Description of Unknown: gRNA target site sequence
acctcactgggcaccctccc

SEQ ID NO: 7013 - DNA, 20 bp, Unknown
  Description of Unknown: gRNA target site sequence
cctcactgggcaccctccca

SEQ ID NO: 7014 - DNA, 20 bp, Unknown
  Description of Unknown: gRNA target site sequence
ctcactgggcaccctcccag

SEQ ID NO: 7015 - DNA, 20 bp, Unknown
  Description of Unknown: gRNA target site sequence
tgggcaccctcccaggggac

SEQ ID NO: 7016 - DNA, 20 bp, Unknown
  Description of Unknown: gRNA target site sequence
caccctcccaggggacgagt

SEQ ID NO: 7017 - DNA, 20 bp, Unknown
  Description of Unknown: gRNA target site sequence
accctcccaggggacgagtg

SEQ ID NO: 7018 - DNA, 20 bp, Unknown
  Description of Unknown: gRNA target site sequence
ccctcccaggggacgagtga

SEQ ID NO: 7019 - DNA, 20 bp, Unknown
  Description of Unknown: gRNA target site sequence
cctcccaggggacgagtgag

SEQ ID NO: 7020 - DNA, 20 bp, Unknown
  Description of Unknown: gRNA target site sequence
ggggacgagtgaggggtttg

SEQ ID NO: 7021 - DNA, 20 bp, Unknown
  Description of Unknown: gRNA target site sequence
gaggggtttgaagtgacctt

SEQ ID NO: 7022 - DNA, 20 bp, Unknown
  Description of Unknown: gRNA target site sequence
aggggtttgaagtgaccttg

SEQ ID NO: 7023 - DNA, 20 bp, Unknown
  Description of Unknown: gRNA target site sequence
gaagtgaccttgaggccacc

SEQ ID NO: 7024 - DNA, 20 bp, Unknown
  Description of Unknown: gRNA target site sequence
aagtgaccttgaggccaccc

SEQ ID NO: 7025 - DNA, 20 bp, Unknown
  Description of Unknown: gRNA target site sequence
agtgaccttgaggccaccca

SEQ ID NO: 7026 - DNA, 20 bp, Unknown
  Description of Unknown: gRNA target site sequence
ccctgttccctctgtgccca

SEQ ID NO: 7027 - DNA, 20 bp, Unknown
  Description of Unknown: gRNA target site sequence
cctctgtgcccatggcctcc

SEQ ID NO: 7028 - DNA, 20 bp, Unknown
  Description of Unknown: gRNA target site sequence
cccatggcctcccggctgac

SEQ ID NO: 7029 - DNA, 20 bp, Unknown
  Description of Unknown: gRNA target site sequence
tcacctgcgtgcctgtcccc

SEQ ID NO: 7030 - DNA, 20 bp, Unknown
  Description of Unknown: gRNA target site sequence
gtgcctgtcccccagcttcc

SEQ ID NO: 7031 - DNA, 20 bp, Unknown
  Description of Unknown: gRNA target site sequence
cctgtcccccagcttcctgg

SEQ ID NO: 7032 - DNA, 20 bp, Unknown
  Description of Unknown: gRNA target site sequence
cagcttcctggtggtgttcc

SEQ ID NO: 7033 - DNA, 20 bp, Unknown
  Description of Unknown: gRNA target site sequence
gcttcctggtggtgttccca

SEQ ID NO: 7034 - DNA, 20 bp, Unknown
  Description of Unknown: gRNA target site sequence
cttcctggtggtgttcccag

SEQ ID NO: 7035 - DNA, 20 bp, Unknown
  Description of Unknown: gRNA target site sequence
cctggtggtgttcccagagg

SEQ ID NO: 7036 - DNA, 20 bp, Unknown
  Description of Unknown: gRNA target site sequence
ggtggtgttcccagaggtgg

SEQ ID NO: 7037 - DNA, 20 bp, Unknown
  Description of Unknown: gRNA target site sequence
gtggtgttcccagaggtggc

SEQ ID NO: 7038 - DNA, 20 bp, Unknown
  Description of Unknown: gRNA target site sequence
tggtgttcccagaggtggca

SEQ ID NO: 7039 - DNA, 20 bp, Unknown
  Description of Unknown: gRNA target site sequence
ggtgttcccagaggtggcag

SEQ ID NO: 7040 - DNA, 20 bp, Unknown
  Description of Unknown: gRNA target site sequence
ttcccagaggtggcaggggc

SEQ ID NO: 7041 - DNA, 20 bp, Unknown
  Description of Unknown: gRNA target site sequence
tcccagaggtggcaggggcg

SEQ ID NO: 7042 - DNA, 20 bp, Unknown
  Description of Unknown: gRNA target site sequence
cccagaggtggcaggggcga

SEQ ID NO: 7043 - DNA, 20 bp, Unknown
  Description of Unknown: gRNA target site sequence
gaggtggcaggggcgagggc

SEQ ID NO: 7044 - DNA, 20 bp, Unknown
  Description of Unknown: gRNA target site sequence
ggggcgagggccagctacac

SEQ ID NO: 7045 - DNA, 20 bp, Unknown
  Description of Unknown: gRNA target site sequence
gggcgagggccagctacaca

SEQ ID NO: 7046 - DNA, 20 bp, Unknown
  Description of Unknown: gRNA target site sequence
ggcgagggccagctacacaa

SEQ ID NO: 7047 - DNA, 20 bp, Unknown
  Description of Unknown: gRNA target site sequence
gcgagggccagctacacaag

SEQ ID NO: 7048 - DNA, 20 bp, Unknown
  Description of Unknown: gRNA target site sequence
cagctacacaaggggctgct

SEQ ID NO: 7049 - DNA, 20 bp, Unknown
  Description of Unknown: gRNA target site sequence
agctacacaaggggctgctg

SEQ ID NO: 7050 - DNA, 20 bp, Unknown
  Description of Unknown: gRNA target site sequence
acacaaggggctgctgaggt

SEQ ID NO: 7051 - DNA, 20 bp, Unknown
  Description of Unknown: gRNA target site sequence
ctgaggtgagccccctctct

SEQ ID NO: 7052 - DNA, 20 bp, Unknown
  Description of Unknown: gRNA target site sequence
ctgagaccgcccttgtctgc

SEQ ID NO: 7053 - DNA, 20 bp, Unknown
  Description of Unknown: gRNA target site sequence
gaccgcccttgtctgccggc

SEQ ID NO: 7054 - DNA, 20 bp, Unknown
  Description of Unknown: gRNA target site sequence
gcccttgtctgccggccggc

SEQ ID NO: 7055 - DNA, 20 bp, Unknown
  Description of Unknown: gRNA target site sequence
cccttgtctgccggccggcc

SEQ ID NO: 7056 - DNA, 20 bp, Unknown
  Description of Unknown: gRNA target site sequence
ccttgtctgccggccggcca

SEQ ID NO: 7057 - DNA, 20 bp, Unknown
  Description of Unknown: gRNA target site sequence
cttgtctgccggccggccag

SEQ ID NO: 7058 - DNA, 20 bp, Unknown
  Description of Unknown: gRNA target site sequence
gtctgccggccggccagggg

SEQ ID NO: 7059 - DNA, 20 bp, Unknown
  Description of Unknown: gRNA target site sequence
gccaggggaagctccctgca

SEQ ID NO: 7060 - DNA, 20 bp, Unknown
  Description of Unknown: gRNA target site sequence
ccaggggaagctccctgcat

SEQ ID NO: 7061 - DNA, 20 bp, Unknown
  Description of Unknown: gRNA target site sequence
gctccctgcataggcgtgtg

SEQ ID NO: 7062 - DNA, 20 bp, Unknown
  Description of Unknown: gRNA target site sequence
ctgcataggcgtgtgcggcg

SEQ ID NO: 7063 - DNA, 20 bp, Unknown
  Description of Unknown: gRNA target site sequence
tgcataggcgtgtgcggcgt

SEQ ID NO: 7064 - DNA, 20 bp, Unknown
  Description of Unknown: gRNA target site sequence
aggcgtgtgcggcgtgggcc

SEQ ID NO: 7065 - DNA, 20 bp, Unknown
  Description of Unknown: gRNA target site sequence
ggcgtgtgcggcgtgggccc

SEQ ID NO: 7066 - DNA, 20 bp, Unknown
  Description of Unknown: gRNA target site sequence
gcgtgtgcggcgtgggcccg

SEQ ID NO: 7067 - DNA, 20 bp, Unknown
  Description of Unknown: gRNA target site sequence
cgtgggcccggggaatcttc

SEQ ID NO: 7068 - DNA, 20 bp, Unknown
  Description of Unknown: gRNA target site sequence
ggggaatcttccagccactc

SEQ ID NO: 7069 - DNA, 20 bp, Unknown
  Description of Unknown: gRNA target site sequence
ggaatcttccagccactcca

SEQ ID NO: 7070 - DNA, 20 bp, Unknown
  Description of Unknown: gRNA target site sequence
atcttccagccactccagag

SEQ ID NO: 7071 - DNA, 20 bp, Unknown
  Description of Unknown: gRNA target site sequence
ctccagagtggattttgacc

SEQ ID NO: 7072 - DNA, 20 bp, Unknown
  Description of Unknown: gRNA target site sequence
tccagagtggattttgacca

SEQ ID NO: 7073 - DNA, 20 bp, Unknown
  Description of Unknown: gRNA target site sequence
cagagtggattttgaccaag

SEQ ID NO: 7074 - DNA, 20 bp, Unknown
  Description of Unknown: gRNA target site sequence
agagtggattttgaccaagg

SEQ ID NO: 7075 - DNA, 20 bp, Unknown
  Description of Unknown: gRNA target site sequence
gagtggattttgaccaagga

SEQ ID NO: 7076 - DNA, 20 bp, Unknown
  Description of Unknown: gRNA target site sequence
attttgaccaaggagggctg

SEQ ID NO: 7077 - DNA, 20 bp, Unknown
  Description of Unknown: gRNA target site sequence
ttttgaccaaggagggctgt

SEQ ID NO: 7078 - DNA, 20 bp, Unknown
  Description of Unknown: gRNA target site sequence
tttgaccaaggagggctgtg

SEQ ID NO: 7079 - DNA, 20 bp, Unknown
  Description of Unknown: gRNA target site sequence
gaccaaggagggctgtgggg

SEQ ID NO: 7080 - DNA, 20 bp, Unknown
  Description of Unknown: gRNA target site sequence
ctgtggggtagtgtgactct

SEQ ID NO: 7081 - DNA, 20 bp, Unknown
  Description of Unknown: gRNA target site sequence
tgtggggtagtgtgactctc

SEQ ID NO: 7082 - DNA, 20 bp, Unknown
  Description of Unknown: gRNA target site sequence
gtggggtagtgtgactctca

SEQ ID NO: 7083 - DNA, 20 bp, Unknown
  Description of Unknown: gRNA target site sequence
ggtagtgtgactctcagggc

SEQ ID NO: 7084 - DNA, 20 bp, Unknown
  Description of Unknown: gRNA target site sequence
agtgtgactctcagggccag

SEQ ID NO: 7085 - DNA, 20 bp, Unknown
  Description of Unknown: gRNA target site sequence
gtgtgactctcagggccagc

SEQ ID NO: 7086 - DNA, 20 bp, Unknown
  Description of Unknown: gRNA target site sequence
tgactctcagggccagcagg

SEQ ID NO: 7087 - DNA, 20 bp, Unknown
  Description of Unknown: gRNA target site sequence
tctcagggccagcaggcagc

SEQ ID NO: 7088 - DNA, 20 bp, Unknown
  Description of Unknown: gRNA target site sequence
ctcagggccagcaggcagcc

SEQ ID NO: 7089 - DNA, 20 bp, Unknown
  Description of Unknown: gRNA target site sequence
gggccagcaggcagccaggc

SEQ ID NO: 7090 - DNA, 20 bp, Unknown
  Description of Unknown: gRNA target site sequence
ggccagcaggcagccaggcc

SEQ ID NO: 7091 - DNA, 20 bp, Unknown
  Description of Unknown: gRNA target site sequence
gccagcaggcagccaggcca

SEQ ID NO: 7092 - DNA, 20 bp, Unknown
  Description of Unknown: gRNA target site sequence
ggcagccaggccagggcact

SEQ ID NO: 7093 - DNA, 20 bp, Unknown
  Description of Unknown: gRNA target site sequence
cagccaggccagggcactca

SEQ ID NO: 7094 - DNA, 20 bp, Unknown
  Description of Unknown: gRNA target site sequence
cactcagagacctgcctgaa

SEQ ID NO: 7095 - DNA, 20 bp, Unknown
  Description of Unknown: gRNA target site sequence
ctcagagacctgcctgaatg

SEQ ID NO: 7096 - DNA, 20 bp, Unknown
  Description of Unknown: gRNA target site sequence
tcagagacctgcctgaatgg

SEQ ID NO: 7097 - DNA, 20 bp, Unknown
  Description of Unknown: gRNA target site sequence
gagacctgcctgaatggagg

SEQ ID NO: 7098 - DNA, 20 bp, Unknown
  Description of Unknown: gRNA target site sequence
cctgcctgaatggaggaaga

SEQ ID NO: 7099 - DNA, 20 bp, Unknown
  Description of Unknown: gRNA target site sequence
ctgcctgaatggaggaagat

SEQ ID NO: 7100 - DNA, 20 bp, Unknown
  Description of Unknown: gRNA target site sequence
aatggaggaagatgggcttc

SEQ ID NO: 7101 - DNA, 20 bp, Unknown
  Description of Unknown: gRNA target site sequence
ggaagatgggcttctggcat

SEQ ID NO: 7102 - DNA, 20 bp, Unknown
  Description of Unknown: gRNA target site sequence
gaagatgggcttctggcatc

SEQ ID NO: 7103 - DNA, 20 bp, Unknown
  Description of Unknown: gRNA target site sequence
aagatgggcttctggcatca

SEQ ID NO: 7104 - DNA, 20 bp, Unknown
  Description of Unknown: gRNA target site sequence
gggcttctggcatcagggcc

SEQ ID NO: 7105 - DNA, 20 bp, Unknown
  Description of Unknown: gRNA target site sequence
gcttctggcatcagggccaa

SEQ ID NO: 7106 - DNA, 20 bp, Unknown
  Description of Unknown: gRNA target site sequence
cttctggcatcagggccaag

SEQ ID NO: 7107 - DNA, 20 bp, Unknown
  Description of Unknown: gRNA target site sequence
ttctggcatcagggccaaga

SEQ ID NO: 7108 - DNA, 20 bp, Unknown
  Description of Unknown: gRNA target site sequence
atcagggccaagagggctcc

SEQ ID NO: 7109 - DNA, 20 bp, Unknown
  Description of Unknown: gRNA target site sequence
tcagggccaagagggctcct

SEQ ID NO: 7110 - DNA, 20 bp, Unknown
  Description of Unknown: gRNA target site sequence
agggccaagagggctcctgg

SEQ ID NO: 7111 - DNA, 20 bp, Unknown
  Description of Unknown: gRNA target site sequence
gggccaagagggctcctggg

SEQ ID NO: 7112 - DNA, 20 bp, Unknown
  Description of Unknown: gRNA target site sequence
ccaagagggctcctgggagg

SEQ ID NO: 7113 - DNA, 20 bp, Unknown
  Description of Unknown: gRNA target site sequence
agggctcctgggaggcagcc

SEQ ID NO: 7114 - DNA, 20 bp, Unknown
  Description of Unknown: gRNA target site sequence
gggctcctgggaggcagcct

SEQ ID NO: 7115 - DNA, 20 bp, Unknown
  Description of Unknown: gRNA target site sequence
tcctgggaggcagcctggga

SEQ ID NO: 7116 - DNA, 20 bp, Unknown
  Description of Unknown: gRNA target site sequence
cctgggaggcagcctgggac

SEQ ID NO: 7117 - DNA, 20 bp, Unknown
  Description of Unknown: gRNA target site sequence
ctgggaggcagcctgggaca

SEQ ID NO: 7118 - DNA, 20 bp, Unknown
  Description of Unknown: gRNA target site sequence
ggaggcagcctgggacaggg

SEQ ID NO: 7119 - DNA, 20 bp, Unknown
  Description of Unknown: gRNA target site sequence
gaggcagcctgggacagggt

SEQ ID NO: 7120 - DNA, 20 bp, Unknown
  Description of Unknown: gRNA target site sequence
gcctgggacagggtgggctg

SEQ ID NO: 7121 - DNA, 20 bp, Unknown
  Description of Unknown: gRNA target site sequence
gggtgggctgcagcccttac

SEQ ID NO: 7122 - DNA, 20 bp, Unknown
  Description of Unknown: gRNA target site sequence
ggtgggctgcagcccttact

SEQ ID NO: 7123 - DNA, 20 bp, Unknown
  Description of Unknown: gRNA target site sequence
gctgcagcccttactgggcc

SEQ ID NO: 7124 - DNA, 20 bp, Unknown
  Description of Unknown: gRNA target site sequence
ctgcagcccttactgggcct

SEQ ID NO: 7125 - DNA, 20 bp, Unknown
  Description of Unknown: gRNA target site sequence
agcccttactgggcctaggc

SEQ ID NO: 7126 - DNA, 20 bp, Unknown
  Description of Unknown: gRNA target site sequence
gcccttactgggcctaggct

SEQ ID NO: 7127 - DNA, 20 bp, Unknown
  Description of Unknown: gRNA target site sequence
cccttactgggcctaggctg

SEQ ID NO: 7128 - DNA, 20 bp, Unknown
  Description of Unknown: gRNA target site sequence
tactgggcctaggctggggc

SEQ ID NO: 7129 - DNA, 20 bp, Unknown
  Description of Unknown: gRNA target site sequence
actgggcctaggctggggct

SEQ ID NO: 7130 - DNA, 20 bp, Unknown
  Description of Unknown: gRNA target site sequence
gggcctaggctggggctggg

SEQ ID NO: 7131 - DNA, 20 bp, Unknown
  Description of Unknown: gRNA target site sequence
aggctggggctgggtggact

SEQ ID NO: 7132 - DNA, 20 bp, Unknown
  Description of Unknown: gRNA target site sequence
ggggctgggtggactcggca

SEQ ID NO: 7133 - DNA, 20 bp, Unknown
  Description of Unknown: gRNA target site sequence
ggctgggtggactcggcaca

SEQ ID NO: 7134 - DNA, 20 bp, Unknown
  Description of Unknown: gRNA target site sequence
tgggtggactcggcacagag

SEQ ID NO: 7135 - DNA, 20 bp, Unknown
  Description of Unknown: gRNA target site sequence
gggtggactcggcacagagc

SEQ ID NO: 7136 - DNA, 20 bp, Unknown
  Description of Unknown: gRNA target site sequence
ggtggactcggcacagagca

SEQ ID NO: 7137 - DNA, 20 bp, Unknown
  Description of Unknown: gRNA target site sequence
gtggactcggcacagagcag

SEQ ID NO: 7138 - DNA, 20 bp, Unknown
  Description of Unknown: gRNA target site sequence
aggggaaatgccctgccctc

SEQ ID NO: 7139 - DNA, 20 bp, Unknown
  Description of Unknown: gRNA target site sequence
ggggaaatgccctgccctct

SEQ ID NO: 7140 - DNA, 20 bp, Unknown
  Description of Unknown: gRNA target site sequence
tgccctgccctctgggtttc

SEQ ID NO: 7141 - DNA, 20 bp, Unknown
  Description of Unknown: gRNA target site sequence
gccctgccctctgggtttct

SEQ ID NO: 7142 - DNA, 20 bp, Unknown
  Description of Unknown: gRNA target site sequence
cctctgggtttctgggaatg

SEQ ID NO: 7143 - DNA, 20 bp, Unknown
  Description of Unknown: gRNA target site sequence
ctgggtttctgggaatgcag

SEQ ID NO: 7144 - DNA, 20 bp, Unknown
  Description of Unknown: gRNA target site sequence
tgggtttctgggaatgcagt

SEQ ID NO: 7145 - DNA, 20 bp, Unknown
  Description of Unknown: gRNA target site sequence
gggtttctgggaatgcagtg

SEQ ID NO: 7146 - DNA, 20 bp, Unknown
  Description of Unknown: gRNA target site sequence
ctgggaatgcagtggggacc

SEQ ID NO: 7147 - DNA, 20 bp, Unknown
  Description of Unknown: gRNA target site sequence
tgggaatgcagtggggaccc

SEQ ID NO: 7148 - DNA, 20 bp, Unknown
  Description of Unknown: gRNA target site sequence
gggaatgcagtggggaccca

SEQ ID NO: 7149 - DNA, 20 bp, Unknown
  Description of Unknown: gRNA target site sequence
ggaatgcagtggggacccag

SEQ ID NO: 7150 - DNA, 20 bp, Unknown
  Description of Unknown: gRNA target site sequence
acccaggggccccaccaccg

SEQ ID NO: 7151 - DNA, 20 bp, Unknown
  Description of Unknown: gRNA target site sequence
cccaggggccccaccaccgc

SEQ ID NO: 7152 - DNA, 20 bp, Unknown
  Description of Unknown: gRNA target site sequence
aggggccccaccaccgcagg

SEQ ID NO: 7153 - DNA, 20 bp, Unknown
  Description of Unknown: gRNA target site sequence
caccaccgcaggcagcccct

SEQ ID NO: 7154 - DNA, 20 bp, Unknown
  Description of Unknown: gRNA target site sequence
accaccgcaggcagcccctc

SEQ ID NO: 7155 - DNA, 20 bp, Unknown
  Description of Unknown: gRNA target site sequence
ccaccgcaggcagcccctcg

SEQ ID NO: 7156 - DNA, 20 bp, Unknown
  Description of Unknown: gRNA target site sequence
ccctcggggtctccatctcc

SEQ ID NO: 7157 - DNA, 20 bp, Unknown
  Description of Unknown: gRNA target site sequence
cctcggggtctccatctccc

SEQ ID NO: 7158 - DNA, 20 bp, Unknown
  Description of Unknown: gRNA target site sequence
ggggtctccatctcccaggc

SEQ ID NO: 7159 - DNA, 20 bp, Unknown
  Description of Unknown: gRNA target site sequence
gggtctccatctcccaggcc

SEQ ID NO: 7160 - DNA, 20 bp, Unknown
  Description of Unknown: gRNA target site sequence
ggtctccatctcccaggcca

SEQ ID NO: 7161 - DNA, 20 bp, Unknown
  Description of Unknown: gRNA target site sequence
cccaggccagggctgccatg

SEQ ID NO: 7162 - DNA, 20 bp, Unknown
  Description of Unknown: gRNA target site sequence
cagggctgccatgcagctgt

SEQ ID NO: 7163 - DNA, 20 bp, Unknown
  Description of Unknown: gRNA target site sequence
agggctgccatgcagctgtc

SEQ ID NO: 7164 - DNA, 20 bp, Unknown
  Description of Unknown: gRNA target site sequence
ctgccatgcagctgtcggga

SEQ ID NO: 7165 - DNA, 20 bp, Unknown
  Description of Unknown: gRNA target site sequence
catgcagctgtcgggacaga

SEQ ID NO: 7166 - DNA, 20 bp, Unknown
  Description of Unknown: gRNA target site sequence
atgcagctgtcgggacagac

SEQ ID NO: 7167 - DNA, 20 bp, Unknown
  Description of Unknown: gRNA target site sequence
cagctgtcgggacagacagg

SEQ ID NO: 7168 - DNA, 20 bp, Unknown
  Description of Unknown: gRNA target site sequence
agctgtcgggacagacaggc

SEQ ID NO: 7169 - DNA, 20 bp, Unknown
  Description of Unknown: gRNA target site sequence
gtcgggacagacaggcaggt

SEQ ID NO: 7170 - DNA, 20 bp, Unknown
  Description of Unknown: gRNA target site sequence
tcgggacagacaggcaggtg

SEQ ID NO: 7171 - DNA, 20 bp, Unknown
  Description of Unknown: gRNA target site sequence
acagacaggcaggtgaggaa

SEQ ID NO: 7172 - DNA, 20 bp, Unknown
  Description of Unknown: gRNA target site sequence
gacaggcaggtgaggaacag

SEQ ID NO: 7173 - DNA, 20 bp, Unknown
  Description of Unknown: gRNA target site sequence
gtgaggaacagaagtcatca

SEQ ID NO: 7174 - DNA, 20 bp, Unknown
  Description of Unknown: gRNA target site sequence
tgaggaacagaagtcatcac

SEQ ID NO: 7175 - DNA, 20 bp, Unknown
  Description of Unknown: gRNA target site sequence
gaagtcatcacgggtactgt

SEQ ID NO: 7176 - DNA, 20 bp, Unknown
  Description of Unknown: gRNA target site sequence
gtcatcacgggtactgtgag

SEQ ID NO: 7177 - DNA, 20 bp, Unknown
  Description of Unknown: gRNA target site sequence
tcatcacgggtactgtgagc

SEQ ID NO: 7178 - DNA, 20 bp, Unknown
  Description of Unknown: gRNA target site sequence
catcacgggtactgtgagca

SEQ ID NO: 7179 - DNA, 20 bp, Unknown
  Description of Unknown: gRNA target site sequence
ctgtgagcagggaccctgca

SEQ ID NO: 7180 - DNA, 20 bp, Unknown
  Description of Unknown: gRNA target site sequence
gagcagggaccctgcatggc

SEQ ID NO: 7181 - DNA, 20 bp, Unknown
  Description of Unknown: gRNA target site sequence
agcagggaccctgcatggct

SEQ ID NO: 7182 - DNA, 20 bp, Unknown
  Description of Unknown: gRNA target site sequence
agggaccctgcatggctagg

SEQ ID NO: 7183 - DNA, 20 bp, Unknown
  Description of Unknown: gRNA target site sequence
ctgcatggctaggaagtgct

SEQ ID NO: 7184 - DNA, 20 bp, Unknown
  Description of Unknown: gRNA target site sequence
tgcatggctaggaagtgcta

SEQ ID NO: 7185 - DNA, 20 bp, Unknown
  Description of Unknown: gRNA target site sequence
gcatggctaggaagtgctaa

SEQ ID NO: 7186 - DNA, 20 bp, Unknown
  Description of Unknown: gRNA target site sequence
ggaagtgctaagggaccccc

SEQ ID NO: 7187 - DNA, 20 bp, Unknown
  Description of Unknown: gRNA target site sequence
gctaagggaccccccagctg

SEQ ID NO: 7188 - DNA, 20 bp, Unknown
  Description of Unknown: gRNA target site sequence
ctaagggaccccccagctgt

SEQ ID NO: 7189 - DNA, 20 bp, Unknown
  Description of Unknown: gRNA target site sequence
taagggaccccccagctgta

SEQ ID NO: 7190 - DNA, 20 bp, Unknown
  Description of Unknown: gRNA target site sequence
ggaccccccagctgtagggc

SEQ ID NO: 7191 - DNA, 20 bp, Unknown
  Description of Unknown: gRNA target site sequence
gaccccccagctgtagggcg

SEQ ID NO: 7192 - DNA, 20 bp, Unknown
  Description of Unknown: gRNA target site sequence
ccagctgtagggcgaggtgc

SEQ ID NO: 7193 - DNA, 20 bp, Unknown
  Description of Unknown: gRNA target site sequence
gtagggcgaggtgctggcga

SEQ ID NO: 7194 - DNA, 20 bp, Unknown
  Description of Unknown: gRNA target site sequence
tagggcgaggtgctggcgac

SEQ ID NO: 7195 - DNA, 20 bp, Unknown
  Description of Unknown: gRNA target site sequence
aggtgctggcgacaggacaa

SEQ ID NO: 7196 - DNA, 20 bp, Unknown
  Description of Unknown: gRNA target site sequence
tgtccacaccgcaatgtccc

SEQ ID NO: 7197 - DNA, 20 bp, Unknown
  Description of Unknown: gRNA target site sequence
gtccacaccgcaatgtccct

SEQ ID NO: 7198 - DNA, 20 bp, Unknown
  Description of Unknown: gRNA target site sequence
ctgtgcattgttcttgtaac

SEQ ID NO: 7199 - DNA, 20 bp, Unknown
  Description of Unknown: gRNA target site sequence
tgttcttgtaactggaaact

SEQ ID NO: 7200 - DNA, 20 bp, Unknown
  Description of Unknown: gRNA target site sequence
tgctatttatttgcacacat

SEQ ID NO: 7201 - DNA, 20 bp, Unknown
  Description of Unknown: gRNA target site sequence
tatttatttgcacacattgg

SEQ ID NO: 7202 - DNA, 20 bp, Unknown
  Description of Unknown: gRNA target site sequence
tttatttgcacacattggtg

SEQ ID NO: 7203 - DNA, 20 bp, Unknown
  Description of Unknown: gRNA target site sequence
ttatttgcacacattggtgg

SEQ ID NO: 7204 - DNA, 20 bp, Unknown
  Description of Unknown: gRNA target site sequence
tatttgcacacattggtgga

SEQ ID NO: 7205 - DNA, 20 bp, Unknown
  Description of Unknown: gRNA target site sequence
gctcctgacttgatctgtgc

SEQ ID NO: 7206 - DNA, 20 bp, Unknown
  Description of Unknown: gRNA target site sequence
ttgatctgtgctggcgctga

SEQ ID NO: 7207 - DNA, 20 bp, Unknown
  Description of Unknown: gRNA target site sequence
tgatctgtgctggcgctgac

SEQ ID NO: 7208 - DNA, 20 bp, Unknown
  Description of Unknown: gRNA target site sequence
ggctcaacccttttcctgtc

SEQ ID NO: 7209 - DNA, 20 bp, Unknown
  Description of Unknown: gRNA target site sequence
ttttcctgtctggcttgcac

SEQ ID NO: 7210 - DNA, 20 bp, Unknown
  Description of Unknown: gRNA target site sequence
gtctggcttgcaccagccct

SEQ ID NO: 7211 - DNA, 20 bp, Unknown
  Description of Unknown: gRNA target site sequence
ttgcaccagccctcagccac

SEQ ID NO: 7212 - DNA, 20 bp, Unknown
  Description of Unknown: gRNA target site sequence
tgcaccagccctcagccact

SEQ ID NO: 7213 - DNA, 20 bp, Unknown
  Description of Unknown: gRNA target site sequence
gccctcagccactgggcctc

SEQ ID NO: 7214 - DNA, 20 bp, Unknown
  Description of Unknown: gRNA target site sequence
tcagccactgggcctcaagc

SEQ ID NO: 7215 - DNA, 20 bp, Unknown
  Description of Unknown: gRNA target site sequence
cagccactgggcctcaagcc

SEQ ID NO: 7216 - DNA, 20 bp, Unknown
  Description of Unknown: gRNA target site sequence
tgggcctcaagccaggaccc

SEQ ID NO: 7217 - DNA, 20 bp, Unknown
  Description of Unknown: gRNA target site sequence
gggcctcaagccaggaccct

SEQ ID NO: 7218 - DNA, 20 bp, Unknown
  Description of Unknown: gRNA target site sequence
cccccccaacccccctattt

SEQ ID NO: 7219 - DNA, 20 bp, Unknown
  Description of Unknown: gRNA target site sequence
ccctattttggaatccaccc

SEQ ID NO: 7220 - DNA, 20 bp, Unknown
  Description of Unknown: gRNA target site sequence
cctattttggaatccacccc

SEQ ID NO: 7221 - DNA, 20 bp, Unknown
  Description of Unknown: gRNA target site sequence
ctattttggaatccaccccg

SEQ ID NO: 7222 - DNA, 20 bp, Unknown
  Description of Unknown: gRNA target site sequence
attttggaatccaccccggg

SEQ ID NO: 7223 - DNA, 20 bp, Unknown
  Description of Unknown: gRNA target site sequence
ttggaatccaccccggggag

SEQ ID NO: 7224 - DNA, 20 bp, Unknown
  Description of Unknown: gRNA target site sequence
tggaatccaccccggggagc

SEQ ID NO: 7225 - DNA, 20 bp, Unknown
  Description of Unknown: gRNA target site sequence
tccaccccggggagcaggtc

SEQ ID NO: 7226 - DNA, 20 bp, Unknown
  Description of Unknown: gRNA target site sequence
ccccggggagcaggtccagc

SEQ ID NO: 7227 - DNA, 20 bp, Unknown
  Description of Unknown: gRNA target site sequence
cccggggagcaggtccagct

SEQ ID NO: 7228 - DNA, 20 bp, Unknown
  Description of Unknown: gRNA target site sequence
gcaggtccagctgggcccct

SEQ ID NO: 7229 - DNA, 20 bp, Unknown
  Description of Unknown: gRNA target site sequence
cctcccctgcctccaccaac

SEQ ID NO: 7230 - DNA, 20 bp, Unknown
  Description of Unknown: gRNA target site sequence
ccctgcctccaccaactggc

SEQ ID NO: 7231 - DNA, 20 bp, Unknown
  Description of Unknown: gRNA target site sequence
cctgcctccaccaactggct

SEQ ID NO: 7232 - DNA, 20 bp, Unknown
  Description of Unknown: gRNA target site sequence
gcctccaccaactggctggg

SEQ ID NO: 7233 - DNA, 20 bp, Unknown
  Description of Unknown: gRNA target site sequence
cctccaccaactggctgggt

SEQ ID NO: 7234 - DNA, 20 bp, Unknown
  Description of Unknown: gRNA target site sequence
ctccaccaactggctgggtg

SEQ ID NO: 7235 - DNA, 20 bp, Unknown
  Description of Unknown: gRNA target site sequence
caccaactggctgggtgggg

SEQ ID NO: 7236 - DNA, 20 bp, Unknown
  Description of Unknown: gRNA target site sequence
accaactggctgggtggggt

SEQ ID NO: 7237 - DNA, 20 bp, Unknown
  Description of Unknown: gRNA target site sequence
ccaactggctgggtggggtg

SEQ ID NO: 7238 - DNA, 20 bp, Unknown
  Description of Unknown: gRNA target site sequence
caactggctgggtggggtgg

SEQ ID NO: 7239 - DNA, 20 bp, Unknown
  Description of Unknown: gRNA target site sequence
tggctgggtggggtgggggc

SEQ ID NO: 7240 - DNA, 20 bp, Unknown
  Description of Unknown: gRNA target site sequence
gtggggtgggggctagacct

SEQ ID NO: 7241 - DNA, 20 bp, Unknown
  Description of Unknown: gRNA target site sequence
gggctagacctcggtgtctg

SEQ ID NO: 7242 - DNA, 20 bp, Unknown
  Description of Unknown: gRNA target site sequence
gacctcggtgtctgcagttc

SEQ ID NO: 7243 - DNA, 20 bp, Unknown
  Description of Unknown: gRNA target site sequence
ctcggtgtctgcagttcaag

SEQ ID NO: 7244 - DNA, 20 bp, Unknown
  Description of Unknown: gRNA target site sequence
gccccctctcccacctcccc

SEQ ID NO: 7245 - DNA, 20 bp, Unknown
  Description of Unknown: gRNA target site sequence
cctctcccacctcccccagc

SEQ ID NO: 7246 - DNA, 20 bp, Unknown
  Description of Unknown: gRNA target site sequence
ccacctcccccagccagtct

SEQ ID NO: 7247 - DNA, 20 bp, Unknown
  Description of Unknown: gRNA target site sequence
acctcccccagccagtctca

SEQ ID NO: 7248 - DNA, 20 bp, Unknown
  Description of Unknown: gRNA target site sequence
ccccagccagtctcagagac

SEQ ID NO: 7249 - DNA, 20 bp, Unknown
  Description of Unknown: gRNA target site sequence
ctcagagactggctcccacc

SEQ ID NO: 7250 - DNA, 20 bp, Unknown
  Description of Unknown: gRNA target site sequence
agactggctcccacccagtg

SEQ ID NO: 7251 - DNA, 20 bp, Unknown
  Description of Unknown: gRNA target site sequence
gactggctcccacccagtgt

SEQ ID NO: 7252 - DNA, 20 bp, Unknown
  Description of Unknown: gRNA target site sequence
actggctcccacccagtgtg

SEQ ID NO: 7253 - DNA, 20 bp, Unknown
  Description of Unknown: gRNA target site sequence
ctggctcccacccagtgtgg

SEQ ID NO: 7254 - DNA, 20 bp, Unknown
  Description of Unknown: gRNA target site sequence
cccacccagtgtgggggtgc

SEQ ID NO: 7255 - DNA, 20 bp, Unknown
  Description of Unknown: gRNA target site sequence
ccacccagtgtgggggtgct

SEQ ID NO: 7256 - DNA, 20 bp, Unknown
  Description of Unknown: gRNA target site sequence
cccagtgtgggggtgctggg

SEQ ID NO: 7257 - DNA, 20 bp, Unknown
  Description of Unknown: gRNA target site sequence
gctgggtggcgacccccacg

SEQ ID NO: 7258 - DNA, 20 bp, Unknown
  Description of Unknown: gRNA target site sequence
ctgggtggcgacccccacgc

SEQ ID NO: 7259 - DNA, 20 bp, Unknown
  Description of Unknown: gRNA target site sequence
tgggtggcgacccccacgca

SEQ ID NO: 7260 - DNA, 20 bp, Unknown
  Description of Unknown: gRNA target site sequence
acgcagggcctgcctcaccc

SEQ ID NO: 7261 - DNA, 20 bp, Unknown
  Description of Unknown: gRNA target site sequence
gcctgcctcaccccagtcct

SEQ ID NO: 7262 - DNA, 20 bp, Unknown
  Description of Unknown: gRNA target site sequence
cctgcctcaccccagtcctc

SEQ ID NO: 7263 - DNA, 20 bp, Unknown
  Description of Unknown: gRNA target site sequence
agtcctcaggccacctcctc

SEQ ID NO: 7264 - DNA, 20 bp, Unknown
  Description of Unknown: gRNA target site sequence
gtcctcaggccacctcctcc

SEQ ID NO: 7265 - DNA, 20 bp, Unknown
  Description of Unknown: gRNA target site sequence
ctcaggccacctcctccagg

SEQ ID NO: 7266 - DNA, 20 bp, Unknown
  Description of Unknown: gRNA target site sequence
tcaggccacctcctccagga

SEQ ID NO: 7267 - DNA, 20 bp, Unknown
  Description of Unknown: gRNA target site sequence
cctcctccaggaaggcttcc

SEQ ID NO: 7268 - DNA, 20 bp, Unknown
  Description of Unknown: gRNA target site sequence
gaaggcttcctggcctccct

SEQ ID NO: 7269 - DNA, 20 bp, Unknown
  Description of Unknown: gRNA target site sequence
gcttcctggcctcccttggc

SEQ ID NO: 7270 - DNA, 20 bp, Unknown
  Description of Unknown: gRNA target site sequence
tcctggcctcccttggctgg

SEQ ID NO: 7271 - DNA, 20 bp, Unknown
  Description of Unknown: gRNA target site sequence
ccttggctggtagtgtctac

SEQ ID NO: 7272 - DNA, 20 bp, Unknown
  Description of Unknown: gRNA target site sequence
cttggctggtagtgtctact

SEQ ID NO: 7273 - DNA, 20 bp, Unknown
  Description of Unknown: gRNA target site sequence
ggctggtagtgtctactagg

SEQ ID NO: 7274 - DNA, 20 bp, Unknown
  Description of Unknown: gRNA target site sequence
gctggtagtgtctactagga

SEQ ID NO: 7275 - DNA, 20 bp, Unknown
  Description of Unknown: gRNA target site sequence
ctactaggaaggtgaatatt

SEQ ID NO: 7276 - DNA, 20 bp, Unknown
  Description of Unknown: gRNA target site sequence
ctaggaaggtgaatattcag

SEQ ID NO: 7277 - DNA, 20 bp, Unknown
  Description of Unknown: gRNA target site sequence
gaatattcagaagtgaccac

SEQ ID NO: 7278 - DNA, 20 bp, Unknown
  Description of Unknown: gRNA target site sequence
attcagaagtgaccactggc

SEQ ID NO: 7279 - DNA, 20 bp, Unknown
  Description of Unknown: gRNA target site sequence
aagtgaccactggctggtcc

SEQ ID NO: 7280 - DNA, 20 bp, Unknown
  Description of Unknown: gRNA target site sequence
ccactggctggtcctggatc

SEQ ID NO: 7281 - DNA, 20 bp, Unknown
  Description of Unknown: gRNA target site sequence
tggctggtcctggatcaagt

SEQ ID NO: 7282 - DNA, 20 bp, Unknown
  Description of Unknown: gRNA target site sequence
gtcctggatcaagttagatt

SEQ ID NO: 7283 - DNA, 20 bp, Unknown
  Description of Unknown: gRNA target site sequence
tcctggatcaagttagattt

SEQ ID NO: 7284 - DNA, 20 bp, Unknown
  Description of Unknown: gRNA target site sequence
cctggatcaagttagatttg

SEQ ID NO: 7285 - DNA, 20 bp, Unknown
  Description of Unknown: gRNA target site sequence
ttagatttggggtgtttcta

SEQ ID NO: 7286 - DNA, 20 bp, Unknown
  Description of Unknown: gRNA target site sequence
tagatttggggtgtttctat

SEQ ID NO: 7287 - DNA, 20 bp, Unknown
  Description of Unknown: gRNA target site sequence
atgggattccattgtttccc

SEQ ID NO: 7288 - DNA, 20 bp, Unknown
  Description of Unknown: gRNA target site sequence
tgggattccattgtttcccc

SEQ ID NO: 7289 - DNA, 20 bp, Unknown
  Description of Unknown: gRNA target site sequence
tttccccaggtgctccctct

SEQ ID NO: 7290 - DNA, 20 bp, Unknown
  Description of Unknown: gRNA target site sequence
tgctccctctcggatccacg

SEQ ID NO: 7291 - DNA, 20 bp, Unknown
  Description of Unknown: gRNA target site sequence
gctccctctcggatccacgt

SEQ ID NO: 7292 - DNA, 20 bp, Unknown
  Description of Unknown: gRNA target site sequence
ctcggatccacgtaggatcg

SEQ ID NO: 7293 - DNA, 20 bp, Unknown
  Description of Unknown: gRNA target site sequence
tcggatccacgtaggatcgt

SEQ ID NO: 7294 - DNA, 20 bp, Unknown
  Description of Unknown: gRNA target site sequence
acgtaggatcgtgggttgat

SEQ ID NO: 7295 - DNA, 20 bp, Unknown
  Description of Unknown: gRNA target site sequence
gtaggatcgtgggttgatga

SEQ ID NO: 7296 - DNA, 20 bp, Unknown
  Description of Unknown: gRNA target site sequence
aggatcgtgggttgatgaga

SEQ ID NO: 7297 - DNA, 20 bp, Unknown
  Description of Unknown: gRNA target site sequence
ggatcgtgggttgatgagag

SEQ ID NO: 7298 - DNA, 20 bp, Unknown
  Description of Unknown: gRNA target site sequence
gatcgtgggttgatgagaga

SEQ ID NO: 7299 - DNA, 20 bp, Unknown
  Description of Unknown: gRNA target site sequence
agagagggctgtgccctatg

SEQ ID NO: 7300 - DNA, 20 bp, Unknown
  Description of Unknown: gRNA target site sequence
gagagggctgtgccctatgc

SEQ ID NO: 7301 - DNA, 20 bp, Unknown
  Description of Unknown: gRNA target site sequence
agagggctgtgccctatgca

SEQ ID NO: 7302 - DNA, 20 bp, Unknown
  Description of Unknown: gRNA target site sequence
ggctgtgccctatgcagggt

SEQ ID NO: 7303 - DNA, 20 bp, Unknown
  Description of Unknown: gRNA target site sequence
gctgtgccctatgcagggtc

SEQ ID NO: 7304 - DNA, 20 bp, Unknown
  Description of Unknown: gRNA target site sequence
tgtgccctatgcagggtcag

SEQ ID NO: 7305 - DNA, 20 bp, Unknown
  Description of Unknown: gRNA target site sequence
gtgccctatgcagggtcagg

SEQ ID NO: 7306 - DNA, 20 bp, Unknown
  Description of Unknown: gRNA target site sequence
tgccctatgcagggtcagga

SEQ ID NO: 7307 - DNA, 20 bp, Unknown
  Description of Unknown: gRNA target site sequence
ccctatgcagggtcaggagg

SEQ ID NO: 7308 - DNA, 20 bp, Unknown
  Description of Unknown: gRNA target site sequence
atgcagggtcaggagggaga

SEQ ID NO: 7309 - DNA, 20 bp, Unknown
  Description of Unknown: gRNA target site sequence
gcagggtcaggagggagaca

SEQ ID NO: 7310 - DNA, 20 bp, Unknown
  Description of Unknown: gRNA target site sequence
gagggagacagagcccatcc

SEQ ID NO: 7311 - DNA, 20 bp, Unknown
  Description of Unknown: gRNA target site sequence
agggagacagagcccatccc

SEQ ID NO: 7312 - DNA, 20 bp, Unknown
  Description of Unknown: gRNA target site sequence
gggagacagagcccatcccg

SEQ ID NO: 7313 - DNA, 20 bp, Unknown
  Description of Unknown: gRNA target site sequence
cagagcccatcccggggctg

SEQ ID NO: 7314 - DNA, 20 bp, Unknown
  Description of Unknown: gRNA target site sequence
cccatcccggggctgtggaa

SEQ ID NO: 7315 - DNA, 20 bp, Unknown
  Description of Unknown: gRNA target site sequence
ccatcccggggctgtggaac

SEQ ID NO: 7316 - DNA, 20 bp, Unknown
  Description of Unknown: gRNA target site sequence
gggctgtggaacaggcctgt

SEQ ID NO: 7317 - DNA, 20 bp, Unknown
  Description of Unknown: gRNA target site sequence
ggctgtggaacaggcctgtg

SEQ ID NO: 7318 - DNA, 20 bp, Unknown
  Description of Unknown: gRNA target site sequence
tgtggaacaggcctgtgagg

SEQ ID NO: 7319 - DNA, 20 bp, Unknown
  Description of Unknown: gRNA target site sequence
ggaacaggcctgtgaggtgg

SEQ ID NO: 7320 - DNA, 20 bp, Unknown
  Description of Unknown: gRNA target site sequence
acaggcctgtgaggtggcgg

SEQ ID NO: 7321 - DNA, 20 bp, Unknown
  Description of Unknown: gRNA target site sequence
caggcctgtgaggtggcggt

SEQ ID NO: 7322 - DNA, 20 bp, Unknown
  Description of Unknown: gRNA target site sequence
aggcctgtgaggtggcggtg

SEQ ID NO: 7323 - DNA, 20 bp, Unknown
  Description of Unknown: gRNA target site sequence
ggcctgtgaggtggcggtgg

SEQ ID NO: 7324 - DNA, 20 bp, Unknown
  Description of Unknown: gRNA target site sequence
tggcggtgggggtgctcccg

SEQ ID NO: 7325 - DNA, 20 bp, Unknown
  Description of Unknown: gRNA target site sequence
gcggtgggggtgctcccgca

SEQ ID NO: 7326 - DNA, 20 bp, Unknown
  Description of Unknown: gRNA target site sequence
ggtgggggtgctcccgcaga

SEQ ID NO: 7327 - DNA, 20 bp, Unknown
  Description of Unknown: gRNA target site sequence
cccgcagagagaccgcatta

SEQ ID NO: 7328 - DNA, 20 bp, Unknown
  Description of Unknown: gRNA target site sequence
ccgcagagagaccgcattac

SEQ ID NO: 7329 - DNA, 20 bp, Unknown
  Description of Unknown: gRNA target site sequence
cattacaggacattgctttc

SEQ ID NO: 7330 - DNA, 20 bp, Unknown
  Description of Unknown: gRNA target site sequence
tacaggacattgctttccag

SEQ ID NO: 7331 - DNA, 20 bp, Unknown
  Description of Unknown: gRNA target site sequence
cattgctttccagaagcgca

SEQ ID NO: 7332 - DNA, 20 bp, Unknown
  Description of Unknown: gRNA target site sequence
tgctttccagaagcgcacag

SEQ ID NO: 7333 - DNA, 20 bp, Unknown
  Description of Unknown: gRNA target site sequence
tttccagaagcgcacagaag

SEQ ID NO: 7334 - DNA, 20 bp, Unknown
  Description of Unknown: gRNA target site sequence
ttccagaagcgcacagaaga

SEQ ID NO: 7335 - DNA, 20 bp, Unknown
  Description of Unknown: gRNA target site sequence
cagaagaaggctgcctgccc

SEQ ID NO: 7336 - DNA, 20 bp, Unknown
  Description of Unknown: gRNA target site sequence
agaagaaggctgcctgcccc

SEQ ID NO: 7337 - DNA, 20 bp, Unknown
  Description of Unknown: gRNA target site sequence
agaaggctgcctgccccggg

SEQ ID NO: 7338 - DNA, 20 bp, Unknown
  Description of Unknown: gRNA target site sequence
aaggctgcctgccccgggcg

SEQ ID NO: 7339 - DNA, 20 bp, Unknown
  Description of Unknown: gRNA target site sequence
aggctgcctgccccgggcgg

SEQ ID NO: 7340 - DNA, 20 bp, Unknown
  Description of Unknown: gRNA target site sequence
ccccgggcggaggaacctgc

SEQ ID NO: 7341 - DNA, 20 bp, Unknown
  Description of Unknown: gRNA target site sequence
ggcggaggaacctgctggcc

SEQ ID NO: 7342 - DNA, 20 bp, Unknown
  Description of Unknown: gRNA target site sequence
aggaacctgctggcccagac

SEQ ID NO: 7343 - DNA, 20 bp, Unknown
  Description of Unknown: gRNA target site sequence
ctgctggcccagaccagacc

SEQ ID NO: 7344 - DNA, 20 bp, Unknown
  Description of Unknown: gRNA target site sequence
agacccggcatctctgaccg

SEQ ID NO: 7345 - DNA, 20 bp, Unknown
  Description of Unknown: gRNA target site sequence
atctctgaccgtggtcccat

SEQ ID NO: 7346 - DNA, 20 bp, Unknown
  Description of Unknown: gRNA target site sequence
tctctgaccgtggtcccatt

SEQ ID NO: 7347 - DNA, 20 bp, Unknown
  Description of Unknown: gRNA target site sequence
ctctgaccgtggtcccatta

SEQ ID NO: 7348 - DNA, 20 bp, Unknown
  Description of Unknown: gRNA target site sequence
accgtggtcccattagggac

SEQ ID NO: 7349 - DNA, 20 bp, Unknown
  Description of Unknown: gRNA target site sequence
ccgtggtcccattagggaca

SEQ ID NO: 7350 - DNA, 20 bp, Unknown
  Description of Unknown: gRNA target site sequence
gggacaaggaaaccgtccca

SEQ ID NO: 7351 - DNA, 20 bp, Unknown
  Description of Unknown: gRNA target site sequence
ggacaaggaaaccgtcccac

SEQ ID NO: 7352 - DNA, 20 bp, Unknown
  Description of Unknown: gRNA target site sequence
aaccgtcccacgggctgtgc

SEQ ID NO: 7353 - DNA, 20 bp, Unknown
  Description of Unknown: gRNA target site sequence
accgtcccacgggctgtgct

SEQ ID NO: 7354 - DNA, 20 bp, Unknown
  Description of Unknown: gRNA target site sequence
cccacgggctgtgctgggat

SEQ ID NO: 7355 - DNA, 20 bp, Unknown
  Description of Unknown: gRNA target site sequence
ccacgggctgtgctgggatg

SEQ ID NO: 7356 - DNA, 20 bp, Unknown
  Description of Unknown: gRNA target site sequence
gggctgtgctgggatgagga

SEQ ID NO: 7357 - DNA, 20 bp, Unknown
  Description of Unknown: gRNA target site sequence
tgtgctgggatgaggacagc

SEQ ID NO: 7358 - DNA, 20 bp, Unknown
  Description of Unknown: gRNA target site sequence
gaggacagcgagcttgtccc

SEQ ID NO: 7359 - DNA, 20 bp, Unknown
  Description of Unknown: gRNA target site sequence
ggacagcgagcttgtcccta

SEQ ID NO: 7360 - DNA, 20 bp, Unknown
  Description of Unknown: gRNA target site sequence
gacagcgagcttgtccctag

SEQ ID NO: 7361 - DNA, 20 bp, Unknown
  Description of Unknown: gRNA target site sequence
gagcttgtccctagaggacc

SEQ ID NO: 7362 - DNA, 20 bp, Unknown
  Description of Unknown: gRNA target site sequence
cttgtccctagaggacctgg

SEQ ID NO: 7363 - DNA, 20 bp, Unknown
  Description of Unknown: gRNA target site sequence
ttgtccctagaggacctggc

SEQ ID NO: 7364 - DNA, 20 bp, Unknown
  Description of Unknown: gRNA target site sequence
tgtccctagaggacctggca

SEQ ID NO: 7365 - DNA, 20 bp, Unknown
  Description of Unknown: gRNA target site sequence
gtccctagaggacctggcag

SEQ ID NO: 7366 - DNA, 20 bp, Unknown
  Description of Unknown: gRNA target site sequence
ctagaggacctggcaggggt

SEQ ID NO: 7367 - DNA, 20 bp, Unknown
  Description of Unknown: gRNA target site sequence
tagaggacctggcaggggtg

SEQ ID NO: 7368 - DNA, 20 bp, Unknown
  Description of Unknown: gRNA target site sequence
gaggacctggcaggggtgag

SEQ ID NO: 7369 - DNA, 20 bp, Unknown
  Description of Unknown: gRNA target site sequence
acctggcaggggtgaggagt

SEQ ID NO: 7370 - DNA, 20 bp, Unknown
  Description of Unknown: gRNA target site sequence
cctggcaggggtgaggagtg

SEQ ID NO: 7371 - DNA, 20 bp, Unknown
  Description of Unknown: gRNA target site sequence
tgaggtcttccaactcctca

SEQ ID NO: 7372 - DNA, 20 bp, Unknown
  Description of Unknown: gRNA target site sequence
ctcacagtcgtgtgtgtgtg

SEQ ID NO: 7373 - DNA, 20 bp, Unknown
  Description of Unknown: gRNA target site sequence
cacagtcgtgtgtgtgtgtg

SEQ ID NO: 7374 - DNA, 20 bp, Unknown
  Description of Unknown: gRNA target site sequence
acagtcgtgtgtgtgtgtgg

SEQ ID NO: 7375 - DNA, 20 bp, Unknown
  Description of Unknown: gRNA target site sequence
gtcgtgtgtgtgtgtggagg

SEQ ID NO: 7376 - DNA, 20 bp, Unknown
  Description of Unknown: gRNA target site sequence
tcgtgtgtgtgtgtggaggt

SEQ ID NO: 7377 - DNA, 20 bp, Unknown
  Description of Unknown: gRNA target site sequence
tgtgtgtgtgtggaggtggg

SEQ ID NO: 7378 - DNA, 20 bp, Unknown
  Description of Unknown: gRNA target site sequence
gtgtgtgtgtggaggtggga

SEQ ID NO: 7379 - DNA, 20 bp, Unknown
  Description of Unknown: gRNA target site sequence
tgtgtgtgtggaggtgggaa

SEQ ID NO: 7380 - DNA, 20 bp, Unknown
  Description of Unknown: gRNA target site sequence
tgtggaggtgggaagggctg

SEQ ID NO: 7381 - DNA, 20 bp, Unknown
  Description of Unknown: gRNA target site sequence
gtggaggtgggaagggctgt

SEQ ID NO: 7382 - DNA, 20 bp, Unknown
  Description of Unknown: gRNA target site sequence
tgggccgaaccgtgtcccca

SEQ ID NO: 7383 - DNA, 20 bp, Unknown
  Description of Unknown: gRNA target site sequence
tgtccccacagattcctatg

SEQ ID NO: 7384 - DNA, 20 bp, Unknown
  Description of Unknown: gRNA target site sequence
ccccacagattcctatgtgg

SEQ ID NO: 7385 - DNA, 20 bp, Unknown
  Description of Unknown: gRNA target site sequence
aagtcctaaccccatgacct

SEQ ID NO: 7386 - DNA, 20 bp, Unknown
  Description of Unknown: gRNA target site sequence
tcctaaccccatgacctcag

SEQ ID NO: 7387 - DNA, 20 bp, Unknown
  Description of Unknown: gRNA target site sequence
cctaaccccatgacctcaga

SEQ ID NO: 7388 - DNA, 20 bp, Unknown
  Description of Unknown: gRNA target site sequence
aaccccatgacctcagaagg

SEQ ID NO: 7389 - DNA, 20 bp, Unknown
  Description of Unknown: gRNA target site sequence
acctcagaaggcggccttat

SEQ ID NO: 7390 - DNA, 20 bp, Unknown
  Description of Unknown: gRNA target site sequence
cctcagaaggcggccttatt

SEQ ID NO: 7391 - DNA, 20 bp, Unknown
  Description of Unknown: gRNA target site sequence
gaaggcggccttattaggaa

SEQ ID NO: 7392 - DNA, 20 bp, Unknown
  Description of Unknown: gRNA target site sequence
aaggcggccttattaggaat

SEQ ID NO: 7393 - DNA, 20 bp, Unknown
  Description of Unknown: gRNA target site sequence
aggcggccttattaggaata

SEQ ID NO: 7394 - DNA, 20 bp, Unknown
  Description of Unknown: gRNA target site sequence
ccttattaggaatagggtga

SEQ ID NO: 7395 - DNA, 20 bp, Unknown
  Description of Unknown: gRNA target site sequence
tattaggaatagggtgacgg

SEQ ID NO: 7396 - DNA, 20 bp, Unknown
  Description of Unknown: gRNA target site sequence
aggaatagggtgacggcagc

SEQ ID NO: 7397 - DNA, 20 bp, Unknown
  Description of Unknown: gRNA target site sequence
ggaatagggtgacggcagct

SEQ ID NO: 7398 - DNA, 20 bp, Unknown
  Description of Unknown: gRNA target site sequence
agggtgacggcagctgggac

SEQ ID NO: 7399 - DNA, 20 bp, Unknown
  Description of Unknown: gRNA target site sequence
gggtgacggcagctgggact

SEQ ID NO: 7400 - DNA, 20 bp, Unknown
  Description of Unknown: gRNA target site sequence
gacggcagctgggactaggt

SEQ ID NO: 7401 - DNA, 20 bp, Unknown
  Description of Unknown: gRNA target site sequence
cagctgggactaggtaagat

SEQ ID NO: 7402 - DNA, 20 bp, Unknown
  Description of Unknown: gRNA target site sequence
agctgggactaggtaagatg

SEQ ID NO: 7403 - DNA, 20 bp, Unknown
  Description of Unknown: gRNA target site sequence
gctgggactaggtaagatga

SEQ ID NO: 7404 - DNA, 20 bp, Unknown
  Description of Unknown: gRNA target site sequence
gactaggtaagatgagggca

SEQ ID NO: 7405 - DNA, 20 bp, Unknown
  Description of Unknown: gRNA target site sequence
actaggtaagatgagggcac

SEQ ID NO: 7406 - DNA, 20 bp, Unknown
  Description of Unknown: gRNA target site sequence
ctaggtaagatgagggcaca

SEQ ID NO: 7407 - DNA, 20 bp, Unknown
  Description of Unknown: gRNA target site sequence
gtaagatgagggcacagggc

SEQ ID NO: 7408 - DNA, 20 bp, Unknown
  Description of Unknown: gRNA target site sequence
taagatgagggcacagggct

SEQ ID NO: 7409 - DNA, 20 bp, Unknown
  Description of Unknown: gRNA target site sequence
gatgagggcacagggctggg

SEQ ID NO: 7410 - DNA, 20 bp, Unknown
  Description of Unknown: gRNA target site sequence
agggctgggtggccattgac

SEQ ID NO: 7411 - DNA, 20 bp, Unknown
  Description of Unknown: gRNA target site sequence
gctgggtggccattgaccag

SEQ ID NO: 7412 - DNA, 20 bp, Unknown
  Description of Unknown: gRNA target site sequence
ctgggtggccattgaccagc

SEQ ID NO: 7413 - DNA, 20 bp, Unknown
  Description of Unknown: gRNA target site sequence
tggccattgaccagcaggcc

SEQ ID NO: 7414 - DNA, 20 bp, Unknown
  Description of Unknown: gRNA target site sequence
agcaggcctggcttcctgta

SEQ ID NO: 7415 - DNA, 20 bp, Unknown
  Description of Unknown: gRNA target site sequence
caggcctggcttcctgtaca

SEQ ID NO: 7416 - DNA, 20 bp, Unknown
  Description of Unknown: gRNA target site sequence
cctgtacagagtcacccgtg

SEQ ID NO: 7417 - DNA, 20 bp, Unknown
  Description of Unknown: gRNA target site sequence
tgtacagagtcacccgtgca

SEQ ID NO: 7418 - DNA, 20 bp, Unknown
  Description of Unknown: gRNA target site sequence
gagtcacccgtgcagagatg

SEQ ID NO: 7419 - DNA, 20 bp, Unknown
  Description of Unknown: gRNA target site sequence
agtcacccgtgcagagatga

SEQ ID NO: 7420 - DNA, 20 bp, Unknown
  Description of Unknown: gRNA target site sequence
cacccgtgcagagatgaagg

SEQ ID NO: 7421 - DNA, 20 bp, Unknown
  Description of Unknown: gRNA target site sequence
cccgtgcagagatgaaggca

SEQ ID NO: 7422 - DNA, 20 bp, Unknown
  Description of Unknown: gRNA target site sequence
gcagagatgaaggcagagcc

SEQ ID NO: 7423 - DNA, 20 bp, Unknown
  Description of Unknown: gRNA target site sequence
cagagatgaaggcagagcct

SEQ ID NO: 7424 - DNA, 20 bp, Unknown
  Description of Unknown: gRNA target site sequence
agagatgaaggcagagcctg

SEQ ID NO: 7425 - DNA, 20 bp, Unknown
  Description of Unknown: gRNA target site sequence
gagatgaaggcagagcctgg

SEQ ID NO: 7426 - DNA, 20 bp, Unknown
  Description of Unknown: gRNA target site sequence
ctgggggatgcttctgaacc

SEQ ID NO: 7427 - DNA, 20 bp, Unknown
  Description of Unknown: gRNA target site sequence
tgggggatgcttctgaaccc

SEQ ID NO: 7428 - DNA, 20 bp, Unknown
  Description of Unknown: gRNA target site sequence
tgcttctgaacccaggaaca

SEQ ID NO: 7429 - DNA, 20 bp, Unknown
  Description of Unknown: gRNA target site sequence
cttctgaacccaggaacaca

SEQ ID NO: 7430 - DNA, 20 bp, Unknown
  Description of Unknown: gRNA target site sequence
ttctgaacccaggaacacag

SEQ ID NO: 7431 - DNA, 20 bp, Unknown
  Description of Unknown: gRNA target site sequence
tctgaacccaggaacacaga

SEQ ID NO: 7432 - DNA, 20 bp, Unknown
  Description of Unknown: gRNA target site sequence
gaacccaggaacacagaggg

SEQ ID NO: 7433 - DNA, 20 bp, Unknown
  Description of Unknown: gRNA target site sequence
agggtggccacaaaaccccc

SEQ ID NO: 7434 - DNA, 20 bp, Unknown
  Description of Unknown: gRNA target site sequence
tggccacaaaaccccccagc

SEQ ID NO: 7435 - DNA, 20 bp, Unknown
  Description of Unknown: gRNA target site sequence
ggccacaaaaccccccagcc

SEQ ID NO: 7436 - DNA, 20 bp, Unknown
  Description of Unknown: gRNA target site sequence
ccacaaaaccccccagccag

SEQ ID NO: 7437 - DNA, 20 bp, Unknown
  Description of Unknown: gRNA target site sequence
caaaaccccccagccaggag

SEQ ID NO: 7438 - DNA, 20 bp, Unknown
  Description of Unknown: gRNA target site sequence
ccccccagccaggagaagct

SEQ ID NO: 7439 - DNA, 20 bp, Unknown
  Description of Unknown: gRNA target site sequence
cccagccaggagaagctgag

SEQ ID NO: 7440 - DNA, 20 bp, Unknown
  Description of Unknown: gRNA target site sequence
cagccaggagaagctgagca

SEQ ID NO: 7441 - DNA, 20 bp, Unknown
  Description of Unknown: gRNA target site sequence
gaagctgagcagagccctct

SEQ ID NO: 7442 - DNA, 20 bp, Unknown
  Description of Unknown: gRNA target site sequence
agctgagcagagccctctcg

SEQ ID NO: 7443 - DNA, 20 bp, Unknown
  Description of Unknown: gRNA target site sequence
agcagagccctctcggagca

SEQ ID NO: 7444 - DNA, 20 bp, Unknown
  Description of Unknown: gRNA target site sequence
gcagagccctctcggagcac

SEQ ID NO: 7445 - DNA, 20 bp, Unknown
  Description of Unknown: gRNA target site sequence
cagagccctctcggagcaca

SEQ ID NO: 7446 - DNA, 20 bp, Unknown
  Description of Unknown: gRNA target site sequence
gagccctctcggagcacagg

SEQ ID NO: 7447 - DNA, 20 bp, Unknown
  Description of Unknown: gRNA target site sequence
agcacagggagccgaccctg

SEQ ID NO: 7448 - DNA, 20 bp, Unknown
  Description of Unknown: gRNA target site sequence
gagccgaccctgtggcccct

SEQ ID NO: 7449 - DNA, 20 bp, Unknown
  Description of Unknown: gRNA target site sequence
gcccctcggtcctgcatgtc

SEQ ID NO: 7450 - DNA, 20 bp, Unknown
  Description of Unknown: gRNA target site sequence
cctgcatgtccagcccccca

SEQ ID NO: 7451 - DNA, 20 bp, Unknown
  Description of Unknown: gRNA target site sequence
gcatgtccagccccccacgg

SEQ ID NO: 7452 - DNA, 20 bp, Unknown
  Description of Unknown: gRNA target site sequence
catgtccagccccccacggc

SEQ ID NO: 7453 - DNA, 20 bp, Unknown
  Description of Unknown: gRNA target site sequence
tgtccagccccccacggcgg

SEQ ID NO: 7454 - DNA, 20 bp, Unknown
  Description of Unknown: gRNA target site sequence
gtccagccccccacggcggg

SEQ ID NO: 7455 - DNA, 20 bp, Unknown
  Description of Unknown: gRNA target site sequence
agccccccacggcgggagga

SEQ ID NO: 7456 - DNA, 20 bp, Unknown
  Description of Unknown: gRNA target site sequence
gccccccacggcgggaggac

SEQ ID NO: 7457 - DNA, 20 bp, Unknown
  Description of Unknown: gRNA target site sequence
ggaggacaggctctgttttt

SEQ ID NO: 7458 - DNA, 20 bp, Unknown
  Description of Unknown: gRNA target site sequence
caggctctgtttttaagcca

SEQ ID NO: 7459 - DNA, 20 bp, Unknown
  Description of Unknown: gRNA target site sequence
ctctgtttttaagccacagc

SEQ ID NO: 7460 - DNA, 20 bp, Unknown
  Description of Unknown: gRNA target site sequence
tctgtttttaagccacagcc

SEQ ID NO: 7461 - DNA, 20 bp, Unknown
  Description of Unknown: gRNA target site sequence
tgtttttaagccacagccgg

SEQ ID NO: 7462 - DNA, 20 bp, Unknown
  Description of Unknown: gRNA target site sequence
tttttaagccacagccggga

SEQ ID NO: 7463 - DNA, 20 bp, Unknown
  Description of Unknown: gRNA target site sequence
ttttaagccacagccgggag

SEQ ID NO: 7464 - DNA, 20 bp, Unknown
  Description of Unknown: gRNA target site sequence
agccacagccgggagaggct

SEQ ID NO: 7465 - DNA, 20 bp, Unknown
  Description of Unknown: gRNA target site sequence
cacagccgggagaggctgag

SEQ ID NO: 7466 - DNA, 20 bp, Unknown
  Description of Unknown: gRNA target site sequence
cagccgggagaggctgagca

SEQ ID NO: 7467 - DNA, 20 bp, Unknown
  Description of Unknown: gRNA target site sequence
agaggctgagcagagcccct

SEQ ID NO: 7468 - DNA, 20 bp, Unknown
  Description of Unknown: gRNA target site sequence
aggctgagcagagcccctca

SEQ ID NO: 7469 - DNA, 20 bp, Unknown
  Description of Unknown: gRNA target site sequence
gagcagagcccctcagagca

SEQ ID NO: 7470 - DNA, 20 bp, Unknown
  Description of Unknown: gRNA target site sequence
agcagagcccctcagagcac

SEQ ID NO: 7471 - DNA, 20 bp, Unknown
  Description of Unknown: gRNA target site sequence
gcagagcccctcagagcaca

SEQ ID NO: 7472 - DNA, 20 bp, Unknown
  Description of Unknown: gRNA target site sequence
cagagcccctcagagcacag

SEQ ID NO: 7473 - DNA, 20 bp, Unknown
  Description of Unknown: gRNA target site sequence
gagcccctcagagcacaggg

SEQ ID NO: 7474 - DNA, 20 bp, Unknown
  Description of Unknown: gRNA target site sequence
gcacaggggagccgaccctg

SEQ ID NO: 7475 - DNA, 20 bp, Unknown
  Description of Unknown: gRNA target site sequence
acaggggagccgaccctgcg

SEQ ID NO: 7476 - DNA, 20 bp, Unknown
  Description of Unknown: gRNA target site sequence
ggagctccatcctgcacgtc

SEQ ID NO: 7477 - DNA, 20 bp, Unknown
  Description of Unknown: gRNA target site sequence
catcctgcacgtccagccct

SEQ ID NO: 7478 - DNA, 20 bp, Unknown
  Description of Unknown: gRNA target site sequence
ctgcacgtccagccctcagt

SEQ ID NO: 7479 - DNA, 20 bp, Unknown
  Description of Unknown: gRNA target site sequence
acgtccagccctcagtcggc

SEQ ID NO: 7480 - DNA, 20 bp, Unknown
  Description of Unknown: gRNA target site sequence
gtccagccctcagtcggcga

SEQ ID NO: 7481 - DNA, 20 bp, Unknown
  Description of Unknown: gRNA target site sequence
tccagccctcagtcggcgag

SEQ ID NO: 7482 - DNA, 20 bp, Unknown
  Description of Unknown: gRNA target site sequence
ccagccctcagtcggcgaga

SEQ ID NO: 7483 - DNA, 20 bp, Unknown
  Description of Unknown: gRNA target site sequence
gccctcagtcggcgagaggg

SEQ ID NO: 7484 - DNA, 20 bp, Unknown
  Description of Unknown: gRNA target site sequence
ccctcagtcggcgagagggc

SEQ ID NO: 7485 - DNA, 20 bp, Unknown
  Description of Unknown: gRNA target site sequence
agagggcaggctctgtttaa

SEQ ID NO: 7486 - DNA, 20 bp, Unknown
  Description of Unknown: gRNA target site sequence
ggctctgtttaaaagccact

SEQ ID NO: 7487 - DNA, 20 bp, Unknown
  Description of Unknown: gRNA target site sequence
ctgtttaaaagccactcggt

SEQ ID NO: 7488 - DNA, 20 bp, Unknown
  Description of Unknown: gRNA target site sequence
tttaaaagccactcggtcgg

SEQ ID NO: 7489 - DNA, 20 bp, Unknown
  Description of Unknown: gRNA target site sequence
taaaagccactcggtcggcg

SEQ ID NO: 7490 - DNA, 20 bp, Unknown
  Description of Unknown: gRNA target site sequence
cggtcggcggagctttgtca

SEQ ID NO: 7491 - DNA, 20 bp, Unknown
  Description of Unknown: gRNA target site sequence
tcggcggagctttgtcatgg

SEQ ID NO: 7492 - DNA, 20 bp, Unknown
  Description of Unknown: gRNA target site sequence
gagctttgtcatggcagctc

SEQ ID NO: 7493 - DNA, 20 bp, Unknown
  Description of Unknown: gRNA target site sequence
tcatggcagctccagccgcc

SEQ ID NO: 7494 - DNA, 20 bp, Unknown
  Description of Unknown: gRNA target site sequence
ctccagccgcccagtcccca

SEQ ID NO: 7495 - DNA, 20 bp, Unknown
  Description of Unknown: gRNA target site sequence
agcaaatgtgtcaatattct

SEQ ID NO: 7496 - DNA, 20 bp, Unknown
  Description of Unknown: gRNA target site sequence
atattcttagttattgattc

SEQ ID NO: 7497 - DNA, 20 bp, Unknown
  Description of Unknown: gRNA target site sequence
tattcttagttattgattct

SEQ ID NO: 7498 - DNA, 20 bp, Unknown
  Description of Unknown: gRNA target site sequence
cttagttattgattctaggt

SEQ ID NO: 7499 - DNA, 20 bp, Unknown
  Description of Unknown: gRNA target site sequence
ttagttattgattctaggtg

SEQ ID NO: 7500 - DNA, 20 bp, Unknown
  Description of Unknown: gRNA target site sequence
tagttattgattctaggtga

SEQ ID NO: 7501 - DNA, 20 bp, Unknown
  Description of Unknown: gRNA target site sequence
tttttgtatatttttcaaaa

SEQ ID NO: 7502 - DNA, 20 bp, Unknown
  Description of Unknown: gRNA target site sequence
cgtttaaaatctgacttcaa

SEQ ID NO: 7503 - DNA, 20 bp, Unknown
  Description of Unknown: gRNA target site sequence
aaaagtttgactttaaaaat

SEQ ID NO: 7504 - DNA, 20 bp, Unknown
  Description of Unknown: gRNA target site sequence
gactttaaaaatatgtgtca

SEQ ID NO: 7505 - DNA, 20 bp, Unknown
  Description of Unknown: gRNA target site sequence
ctttaaaaatatgtgtcatg

SEQ ID NO: 7506 - DNA, 20 bp, Unknown
  Description of Unknown: gRNA target site sequence
tttaaaaatatgtgtcatgg

SEQ ID NO: 7507 - DNA, 20 bp, Unknown
  Description of Unknown: gRNA target site sequence
aaaatatgtgtcatggaggc

SEQ ID NO: 7508 - DNA, 20 bp, Unknown
  Description of Unknown: gRNA target site sequence
tgtgtcatggaggccagatg

SEQ ID NO: 7509 - DNA, 20 bp, Unknown
  Description of Unknown: gRNA target site sequence
gtcatggaggccagatgcag

SEQ ID NO: 7510 - DNA, 20 bp, Unknown
  Description of Unknown: gRNA target site sequence
gtggcttatgcctgtaatcc

SEQ ID NO: 7511 - DNA, 20 bp, Unknown
  Description of Unknown: gRNA target site sequence
atgcctgtaatcccagtact

SEQ ID NO: 7512 - DNA, 20 bp, Unknown
  Description of Unknown: gRNA target site sequence
tgcctgtaatcccagtactt

SEQ ID NO: 7513 - DNA, 20 bp, Unknown
  Description of Unknown: gRNA target site sequence
gcctgtaatcccagtacttg

SEQ ID NO: 7514 - DNA, 20 bp, Unknown
  Description of Unknown: gRNA target site sequence
ctgtaatcccagtacttggg

SEQ ID NO: 7515 - DNA, 20 bp, Unknown
  Description of Unknown: gRNA target site sequence
tgtaatcccagtacttgggg

SEQ ID NO: 7516 - DNA, 20 bp, Unknown
  Description of Unknown: gRNA target site sequence
tcccagtacttggggaggct

SEQ ID NO: 7517 - DNA, 20 bp, Unknown
  Description of Unknown: gRNA target site sequence
cccagtacttggggaggctg

SEQ ID NO: 7518 - DNA, 20 bp, Unknown
  Description of Unknown: gRNA target site sequence
agtacttggggaggctgagg

SEQ ID NO: 7519 - DNA, 20 bp, Unknown
  Description of Unknown: gRNA target site sequence
gtacttggggaggctgaggt

SEQ ID NO: 7520 - DNA, 20 bp, Unknown
  Description of Unknown: gRNA target site sequence
acttggggaggctgaggtgg

SEQ ID NO: 7521 - DNA, 20 bp, Unknown
  Description of Unknown: gRNA target site sequence
cttggggaggctgaggtggg

SEQ ID NO: 7522 - DNA, 20 bp, Unknown
  Description of Unknown: gRNA target site sequence
ctgaggtgggaggaccattt

SEQ ID NO: 7523 - DNA, 20 bp, Unknown
  Description of Unknown: gRNA target site sequence
gtgggaggaccatttgagcc

SEQ ID NO: 7524 - DNA, 20 bp, Unknown
  Description of Unknown: gRNA target site sequence
aggaccatttgagcccagcc

SEQ ID NO: 7525 - DNA, 20 bp, Unknown
  Description of Unknown: gRNA target site sequence
ggaccatttgagcccagcct

SEQ ID NO: 7526 - DNA, 20 bp, Unknown
  Description of Unknown: gRNA target site sequence
gaccatttgagcccagcctg

SEQ ID NO: 7527 - DNA, 20 bp, Unknown
  Description of Unknown: gRNA target site sequence
tgagcccagcctggggaaca

SEQ ID NO: 7528 - DNA, 20 bp, Unknown
  Description of Unknown: gRNA target site sequence
cccagcctggggaacatagc

SEQ ID NO: 7529 - DNA, 20 bp, Unknown
  Description of Unknown: gRNA target site sequence
gaccctgtctctaaaaaaaa

SEQ ID NO: 7530 - DNA, 20 bp, Unknown
  Description of Unknown: gRNA target site sequence
cctgtctctaaaaaaaatgg

SEQ ID NO: 7531 - DNA, 20 bp, Unknown
  Description of Unknown: gRNA target site sequence
ctaaaaaaaatggaagaaat

SEQ ID NO: 7532 - DNA, 20 bp, Unknown
  Description of Unknown: gRNA target site sequence
aaaaatggaagaaattagcc

SEQ ID NO: 7533 - DNA, 20 bp, Unknown
  Description of Unknown: gRNA target site sequence
aatggaagaaattagcctgg

SEQ ID NO: 7534 - DNA, 20 bp, Unknown
  Description of Unknown: gRNA target site sequence
atggaagaaattagcctggc

SEQ ID NO: 7535 - DNA, 20 bp, Unknown
  Description of Unknown: gRNA target site sequence
tggaagaaattagcctggca

SEQ ID NO: 7536 - DNA, 20 bp, Unknown
  Description of Unknown: gRNA target site sequence
aagaaattagcctggcaggg

SEQ ID NO: 7537 - DNA, 20 bp, Unknown
  Description of Unknown: gRNA target site sequence
ggcagggtggcacgtgccta

SEQ ID NO: 7538 - DNA, 20 bp, Unknown
  Description of Unknown: gRNA target site sequence
gtggcacgtgcctatagtcc

SEQ ID NO: 7539 - DNA, 20 bp, Unknown
  Description of Unknown: gRNA target site sequence
gcctatagtcccagctactc

SEQ ID NO: 7540 - DNA, 20 bp, Unknown
  Description of Unknown: gRNA target site sequence
ctatagtcccagctactctg

SEQ ID NO: 7541 - DNA, 20 bp, Unknown
  Description of Unknown: gRNA target site sequence
tatagtcccagctactctgg

SEQ ID NO: 7542 - DNA, 20 bp, Unknown
  Description of Unknown: gRNA target site sequence
agtcccagctactctggagg

SEQ ID NO: 7543 - DNA, 20 bp, Unknown
  Description of Unknown: gRNA target site sequence
tcccagctactctggaggca

SEQ ID NO: 7544 - DNA, 20 bp, Unknown
  Description of Unknown: gRNA target site sequence
cccagctactctggaggcag

SEQ ID NO: 7545 - DNA, 20 bp, Unknown
  Description of Unknown: gRNA target site sequence
agctactctggaggcagagg

SEQ ID NO: 7546 - DNA, 20 bp, Unknown
  Description of Unknown: gRNA target site sequence
gctactctggaggcagaggt

SEQ ID NO: 7547 - DNA, 20 bp, Unknown
  Description of Unknown: gRNA target site sequence
tactctggaggcagaggtgg

SEQ ID NO: 7548 - DNA, 20 bp, Unknown
  Description of Unknown: gRNA target site sequence
cagaggtgggagaattgctt

SEQ ID NO: 7549 - DNA, 20 bp, Unknown
  Description of Unknown: gRNA target site sequence
tgggagaattgcttgagccc

SEQ ID NO: 7550 - DNA, 20 bp, Unknown
  Description of Unknown: gRNA target site sequence
ggagaattgcttgagccccg

SEQ ID NO: 7551 - DNA, 20 bp, Unknown
  Description of Unknown: gRNA target site sequence
gagaattgcttgagccccgg

SEQ ID NO: 7552 - DNA, 20 bp, Unknown
  Description of Unknown: gRNA target site sequence
ttgcttgagccccggaggtc

SEQ ID NO: 7553 - DNA, 20 bp, Unknown
  Description of Unknown: gRNA target site sequence
ttgagccccggaggtcgagt

SEQ ID NO: 7554 - DNA, 20 bp, Unknown
  Description of Unknown: gRNA target site sequence
ccccggaggtcgagtgagcc

SEQ ID NO: 7555 - DNA, 20 bp, Unknown
  Description of Unknown: gRNA target site sequence
gagatcacaccactgcactc

SEQ ID NO: 7556 - DNA, 20 bp, Unknown
  Description of Unknown: gRNA target site sequence
cacaccactgcactccagcc

SEQ ID NO: 7557 - DNA, 20 bp, Unknown
  Description of Unknown: gRNA target site sequence
acaccactgcactccagcct

SEQ ID NO: 7558 - DNA, 20 bp, Unknown
  Description of Unknown: gRNA target site sequence
ctgcactccagcctgggtga

SEQ ID NO: 7559 - DNA, 20 bp, Unknown
  Description of Unknown: gRNA target site sequence
gcactccagcctgggtgaca

SEQ ID NO: 7560 - DNA, 20 bp, Unknown
  Description of Unknown: gRNA target site sequence
tccagcctgggtgacagagc

SEQ ID NO: 7561 - DNA, 20 bp, Unknown
  Description of Unknown: gRNA target site sequence
gagcaagaccctgtcactaa

SEQ ID NO: 7562 - DNA, 20 bp, Unknown
  Description of Unknown: gRNA target site sequence
actaaaagaaacaaacaaaa

SEQ ID NO: 7563 - DNA, 20 bp, Unknown
  Description of Unknown: gRNA target site sequence
agaaacaaacaaaaaagtgt

SEQ ID NO: 7564 - DNA, 20 bp, Unknown
  Description of Unknown: gRNA target site sequence
gaaacaaacaaaaaagtgtc

SEQ ID NO: 7565 - DNA, 20 bp, Unknown
  Description of Unknown: gRNA target site sequence
aaacaaacaaaaaagtgtca

SEQ ID NO: 7566 - DNA, 20 bp, Unknown
  Description of Unknown: gRNA target site sequence
aacaaacaaaaaagtgtcag

SEQ ID NO: 7567 - DNA, 20 bp, Unknown
  Description of Unknown: gRNA target site sequence
aacaaaaaagtgtcaggggc

SEQ ID NO: 7568 - DNA, 20 bp, Unknown
  Description of Unknown: gRNA target site sequence
acaaaaaagtgtcaggggct

SEQ ID NO: 7569 - DNA, 20 bp, Unknown
  Description of Unknown: gRNA target site sequence
aaaagtgtcaggggctgggc

SEQ ID NO: 7570 - DNA, 20 bp, Unknown
  Description of Unknown: gRNA target site sequence
aaagtgtcaggggctgggct

SEQ ID NO: 7571 - DNA, 20 bp, Unknown
  Description of Unknown: gRNA target site sequence
gtgtcaggggctgggctggg

SEQ ID NO: 7572 - DNA, 20 bp, Unknown
  Description of Unknown: gRNA target site sequence
gctgggctgggtagttttca

SEQ ID NO: 7573 - DNA, 20 bp, Unknown
  Description of Unknown: gRNA target site sequence
agatgacccgatttaatcct

SEQ ID NO: 7574 - DNA, 20 bp, Unknown
  Description of Unknown: gRNA target site sequence
gatgacccgatttaatcctc

SEQ ID NO: 7575 - DNA, 20 bp, Unknown
  Description of Unknown: gRNA target site sequence
ccgatttaatcctcaggacg

SEQ ID NO: 7576 - DNA, 20 bp, Unknown
  Description of Unknown: gRNA target site sequence
tcctcaggacgcagccttgc

SEQ ID NO: 7577 - DNA, 20 bp, Unknown
  Description of Unknown: gRNA target site sequence
cctcaggacgcagccttgcc

SEQ ID NO: 7578 - DNA, 20 bp, Unknown
  Description of Unknown: gRNA target site sequence
tcaggacgcagccttgccag

SEQ ID NO: 7579 - DNA, 20 bp, Unknown
  Description of Unknown: gRNA target site sequence
caggacgcagccttgccagg

SEQ ID NO: 7580 - DNA, 20 bp, Unknown
  Description of Unknown: gRNA target site sequence
gcgtcctcacccatgaccca

SEQ ID NO: 7581 - DNA, 20 bp, Unknown
  Description of Unknown: gRNA target site sequence
cacccatgacccaaagcaca

SEQ ID NO: 7582 - DNA, 20 bp, Unknown
  Description of Unknown: gRNA target site sequence
cccatgacccaaagcacacg

SEQ ID NO: 7583 - DNA, 20 bp, Unknown
  Description of Unknown: gRNA target site sequence
atgacccaaagcacacggag

SEQ ID NO: 7584 - DNA, 20 bp, Unknown
  Description of Unknown: gRNA target site sequence
cccaaagcacacggagaagt

SEQ ID NO: 7585 - DNA, 20 bp, Unknown
  Description of Unknown: gRNA target site sequence
aagcacacggagaagtcagt

SEQ ID NO: 7586 - DNA, 20 bp, Unknown
  Description of Unknown: gRNA target site sequence
agcacacggagaagtcagta

SEQ ID NO: 7587 - DNA, 20 bp, Unknown
  Description of Unknown: gRNA target site sequence
gcacacggagaagtcagtaa

SEQ ID NO: 7588 - DNA, 20 bp, Unknown
  Description of Unknown: gRNA target site sequence
cacacggagaagtcagtaag

SEQ ID NO: 7589 - DNA, 20 bp, Unknown
  Description of Unknown: gRNA target site sequence
ggagaagtcagtaaggggcc

SEQ ID NO: 7590 - DNA, 20 bp, Unknown
  Description of Unknown: gRNA target site sequence
taaggggccaagtcctgtcg

SEQ ID NO: 7591 - DNA, 20 bp, Unknown
  Description of Unknown: gRNA target site sequence
aaggggccaagtcctgtcga

SEQ ID NO: 7592 - DNA, 20 bp, Unknown
  Description of Unknown: gRNA target site sequence
gccaagtcctgtcgaaggcc

SEQ ID NO: 7593 - DNA, 20 bp, Unknown
  Description of Unknown: gRNA target site sequence
caagtcctgtcgaaggccca

SEQ ID NO: 7594 - DNA, 20 bp, Unknown
  Description of Unknown: gRNA target site sequence
cctgtcgaaggcccagagct

SEQ ID NO: 7595 - DNA, 20 bp, Unknown
  Description of Unknown: gRNA target site sequence
gtcgaaggcccagagctcag

SEQ ID NO: 7596 - DNA, 20 bp, Unknown
  Description of Unknown: gRNA target site sequence
gaaggcccagagctcagcag

SEQ ID NO: 7597 - DNA, 20 bp, Unknown
  Description of Unknown: gRNA target site sequence
ggcccagagctcagcagtgg

SEQ ID NO: 7598 - DNA, 20 bp, Unknown
  Description of Unknown: gRNA target site sequence
tcagcagtggcagcgctgac

SEQ ID NO: 7599 - DNA, 20 bp, Unknown
  Description of Unknown: gRNA target site sequence
agcagtggcagcgctgactg

SEQ ID NO: 7600 - DNA, 20 bp, Unknown
  Description of Unknown: gRNA target site sequence
gcagcgctgactggagctca

SEQ ID NO: 7601 - DNA, 20 bp, Unknown
  Description of Unknown: gRNA target site sequence
gcgctgactggagctcacag

SEQ ID NO: 7602 - DNA, 20 bp, Unknown
  Description of Unknown: gRNA target site sequence
ctcacagtggtcccacgcca

SEQ ID NO: 7603 - DNA, 20 bp, Unknown
  Description of Unknown: gRNA target site sequence
acagtggtcccacgccaaag

SEQ ID NO: 7604 - DNA, 20 bp, Unknown
  Description of Unknown: gRNA target site sequence
agtggtcccacgccaaagca

SEQ ID NO: 7605 - DNA, 20 bp, Unknown
  Description of Unknown: gRNA target site sequence
gtggtcccacgccaaagcag

SEQ ID NO: 7606 - DNA, 20 bp, Unknown
  Description of Unknown: gRNA target site sequence
cttatttatgctcctgccct

SEQ ID NO: 7607 - DNA, 20 bp, Unknown
  Description of Unknown: gRNA target site sequence
tttatgctcctgccctcgga

SEQ ID NO: 7608 - DNA, 20 bp, Unknown
  Description of Unknown: gRNA target site sequence
ttatgctcctgccctcggac

SEQ ID NO: 7609 - DNA, 20 bp, Unknown
  Description of Unknown: gRNA target site sequence
tatgctcctgccctcggacg

SEQ ID NO: 7610 - DNA, 20 bp, Unknown
  Description of Unknown: gRNA target site sequence
tgccctcggacggggccaat

SEQ ID NO: 7611 - DNA, 20 bp, Unknown
  Description of Unknown: gRNA target site sequence
cctcggacggggccaataag

SEQ ID NO: 7612 - DNA, 20 bp, Unknown
  Description of Unknown: gRNA target site sequence
ggacggggccaataagcagc

SEQ ID NO: 7613 - DNA, 20 bp, Unknown
  Description of Unknown: gRNA target site sequence
gacggggccaataagcagcc

SEQ ID NO: 7614 - DNA, 20 bp, Unknown
  Description of Unknown: gRNA target site sequence
gggccaataagcagccgggt

SEQ ID NO: 7615 - DNA, 20 bp, Unknown
  Description of Unknown: gRNA target site sequence
ggccaataagcagccgggtt

SEQ ID NO: 7616 - DNA, 20 bp, Unknown
  Description of Unknown: gRNA target site sequence
gccaataagcagccgggttg

SEQ ID NO: 7617 - DNA, 20 bp, Unknown
  Description of Unknown: gRNA target site sequence
ggggatatctcataaaacac

SEQ ID NO: 7618 - DNA, 20 bp, Unknown
  Description of Unknown: gRNA target site sequence
gggatatctcataaaacaca

SEQ ID NO: 7619 - DNA, 20 bp, Unknown
  Description of Unknown: gRNA target site sequence
ggatatctcataaaacacaa

SEQ ID NO: 7620 - DNA, 20 bp, Unknown
  Description of Unknown: gRNA target site sequence
tatctcataaaacacaaggg

SEQ ID NO: 7621 - DNA, 20 bp, Unknown
  Description of Unknown: gRNA target site sequence
cacaagggaagcacacacct

SEQ ID NO: 7622 - DNA, 20 bp, Unknown
  Description of Unknown: gRNA target site sequence
acaagggaagcacacacctg

SEQ ID NO: 7623 - DNA, 20 bp, Unknown
  Description of Unknown: gRNA target site sequence
agggaagcacacacctgagg

SEQ ID NO: 7624 - DNA, 20 bp, Unknown
  Description of Unknown: gRNA target site sequence
gggaagcacacacctgaggt

SEQ ID NO: 7625 - DNA, 20 bp, Unknown
  Description of Unknown: gRNA target site sequence
gaagcacacacctgaggtgg

SEQ ID NO: 7626 - DNA, 20 bp, Unknown
  Description of Unknown: gRNA target site sequence
gcacacacctgaggtgggag

SEQ ID NO: 7627 - DNA, 20 bp, Unknown
  Description of Unknown: gRNA target site sequence
cacacctgaggtgggagtgg

SEQ ID NO: 7628 - DNA, 20 bp, Unknown
  Description of Unknown: gRNA target site sequence
tgaggtgggagtggtggccc

SEQ ID NO: 7629 - DNA, 20 bp, Unknown
  Description of Unknown: gRNA target site sequence
gaggtgggagtggtggcccc

SEQ ID NO: 7630 - DNA, 20 bp, Unknown
  Description of Unknown: gRNA target site sequence
tggccccgggaatgaccgaa

SEQ ID NO: 7631 - DNA, 20 bp, Unknown
  Description of Unknown: gRNA target site sequence
gaatgaccgaatggcgaacg

SEQ ID NO: 7632 - DNA, 20 bp, Unknown
  Description of Unknown: gRNA target site sequence
cgaatggcgaacgcagtgaa

SEQ ID NO: 7633 - DNA, 20 bp, Unknown
  Description of Unknown: gRNA target site sequence
ggcgaacgcagtgaatagat

SEQ ID NO: 7634 - DNA, 20 bp, Unknown
  Description of Unknown: gRNA target site sequence
gcgaacgcagtgaatagatc

SEQ ID NO: 7635 - DNA, 20 bp, Unknown
  Description of Unknown: gRNA target site sequence
gaacgcagtgaatagatcag

SEQ ID NO: 7636 - DNA, 20 bp, Unknown
  Description of Unknown: gRNA target site sequence
aacgcagtgaatagatcagg

SEQ ID NO: 7637 - DNA, 20 bp, Unknown
  Description of Unknown: gRNA target site sequence
acgcagtgaatagatcagga

SEQ ID NO: 7638 - DNA, 20 bp, Unknown
  Description of Unknown: gRNA target site sequence
gtgaatagatcaggagggaa

SEQ ID NO: 7639 - DNA, 20 bp, Unknown
  Description of Unknown: gRNA target site sequence
gaatagatcaggagggaaaa

SEQ ID NO: 7640 - DNA, 20 bp, Unknown
  Description of Unknown: gRNA target site sequence
aatagatcaggagggaaaag

SEQ ID NO: 7641 - DNA, 20 bp, Unknown
  Description of Unknown: gRNA target site sequence
aggagggaaaagaggcatcc

SEQ ID NO: 7642 - DNA, 20 bp, Unknown
  Description of Unknown: gRNA target site sequence
aaaagaggcatcctggaatg

SEQ ID NO: 7643 - DNA, 20 bp, Unknown
  Description of Unknown: gRNA target site sequence
tcctggaatgaagaccactg

SEQ ID NO: 7644 - DNA, 20 bp, Unknown
  Description of Unknown: gRNA target site sequence
ggaatgaagaccactgcggc

SEQ ID NO: 7645 - DNA, 20 bp, Unknown
  Description of Unknown: gRNA target site sequence
gaatgaagaccactgcggcc

SEQ ID NO: 7646 - DNA, 20 bp, Unknown
  Description of Unknown: gRNA target site sequence
aatgaagaccactgcggccg

SEQ ID NO: 7647 - DNA, 20 bp, Unknown
  Description of Unknown: gRNA target site sequence
gaagaccactgcggccgggg

SEQ ID NO: 7648 - DNA, 20 bp, Unknown
  Description of Unknown: gRNA target site sequence
gcggccggggtggccacatc

SEQ ID NO: 7649 - DNA, 20 bp, Unknown
  Description of Unknown: gRNA target site sequence
cggccggggtggccacatct

SEQ ID NO: 7650 - DNA, 20 bp, Unknown
  Description of Unknown: gRNA target site sequence
cggggtggccacatctgggt

SEQ ID NO: 7651 - DNA, 20 bp, Unknown
  Description of Unknown: gRNA target site sequence
ggggtggccacatctgggtc

SEQ ID NO: 7652 - DNA, 20 bp, Unknown
  Description of Unknown: gRNA target site sequence
cacatctgggtcaggaccca

SEQ ID NO: 7653 - DNA, 20 bp, Unknown
  Description of Unknown: gRNA target site sequence
acatctgggtcaggacccac

SEQ ID NO: 7654 - DNA, 20 bp, Unknown
  Description of Unknown: gRNA target site sequence
ggtcaggacccacaggaccc

SEQ ID NO: 7655 - DNA, 20 bp, Unknown
  Description of Unknown: gRNA target site sequence
catgcccactgcgccttgct

SEQ ID NO: 7656 - DNA, 20 bp, Unknown
  Description of Unknown: gRNA target site sequence
tgagtgccctgtgctgttac

SEQ ID NO: 7657 - DNA, 20 bp, Unknown
  Description of Unknown: gRNA target site sequence
gtgccctgtgctgttaccag

SEQ ID NO: 7658 - DNA, 20 bp, Unknown
  Description of Unknown: gRNA target site sequence
tgccctgtgctgttaccagt

SEQ ID NO: 7659 - DNA, 20 bp, Unknown
  Description of Unknown: gRNA target site sequence
gccctgtgctgttaccagtg

SEQ ID NO: 7660 - DNA, 20 bp, Unknown
  Description of Unknown: gRNA target site sequence
ctgttaccagtggggaaacc

SEQ ID NO: 7661 - DNA, 20 bp, Unknown
  Description of Unknown: gRNA target site sequence
tgttaccagtggggaaaccg

SEQ ID NO: 7662 - DNA, 20 bp, Unknown
  Description of Unknown: gRNA target site sequence
aaccgaggcatgccacctgt

SEQ ID NO: 7663 - DNA, 20 bp, Unknown
  Description of Unknown: gRNA target site sequence
ccgaggcatgccacctgtga

SEQ ID NO: 7664 - DNA, 20 bp, Unknown
  Description of Unknown: gRNA target site sequence
ccacctgtgagagtcttgtc

SEQ ID NO: 7665 - DNA, 20 bp, Unknown
  Description of Unknown: gRNA target site sequence
gtgagagtcttgtccggcac

SEQ ID NO: 7666 - DNA, 20 bp, Unknown
  Description of Unknown: gRNA target site sequence
agtcttgtccggcacaagcg

SEQ ID NO: 7667 - DNA, 20 bp, Unknown
  Description of Unknown: gRNA target site sequence
gtcttgtccggcacaagcgc

SEQ ID NO: 7668 - DNA, 20 bp, Unknown
  Description of Unknown: gRNA target site sequence
cggcacaagcgcgggcacct

SEQ ID NO: 7669 - DNA, 20 bp, Unknown
  Description of Unknown: gRNA target site sequence
ggcacaagcgcgggcacctg

SEQ ID NO: 7670 - DNA, 20 bp, Unknown
  Description of Unknown: gRNA target site sequence
agcgcgggcacctgaggcac

SEQ ID NO: 7671 - DNA, 20 bp, Unknown
  Description of Unknown: gRNA target site sequence
ggcacctgaggcacgagtgt

SEQ ID NO: 7672 - DNA, 20 bp, Unknown
  Description of Unknown: gRNA target site sequence
gcacctgaggcacgagtgtc

SEQ ID NO: 7673 - DNA, 20 bp, Unknown
  Description of Unknown: gRNA target site sequence
gaggcacgagtgtcaggctg

SEQ ID NO: 7674 - DNA, 20 bp, Unknown
  Description of Unknown: gRNA target site sequence
ttgctcttatctttcccgcc

SEQ ID NO: 7675 - DNA, 20 bp, Unknown
  Description of Unknown: gRNA target site sequence
tgctcttatctttcccgcct

SEQ ID NO: 7676 - DNA, 20 bp, Unknown
  Description of Unknown: gRNA target site sequence
cttatctttcccgcctgggt

SEQ ID NO: 7677 - DNA, 20 bp, Unknown
  Description of Unknown: gRNA target site sequence
ttatctttcccgcctgggtc

SEQ ID NO: 7678 - DNA, 20 bp, Unknown
  Description of Unknown: gRNA target site sequence
tatctttcccgcctgggtcg

SEQ ID NO: 7679 - DNA, 20 bp, Unknown
  Description of Unknown: gRNA target site sequence
tctttcccgcctgggtcggg

SEQ ID NO: 7680 - DNA, 20 bp, Unknown
  Description of Unknown: gRNA target site sequence
ctttcccgcctgggtcgggg

SEQ ID NO: 7681 - DNA, 20 bp, Unknown
  Description of Unknown: gRNA target site sequence
tttcccgcctgggtcgggga

SEQ ID NO: 7682 - DNA, 20 bp, Unknown
  Description of Unknown: gRNA target site sequence
cccgcctgggtcggggaggg

SEQ ID NO: 7683 - DNA, 20 bp, Unknown
  Description of Unknown: gRNA target site sequence
gtcggggagggtggcgtccc

SEQ ID NO: 7684 - DNA, 20 bp, Unknown
  Description of Unknown: gRNA target site sequence
tcggggagggtggcgtcccg

SEQ ID NO: 7685 - DNA, 20 bp, Unknown
  Description of Unknown: gRNA target site sequence
cggggagggtggcgtcccga

SEQ ID NO: 7686 - DNA, 20 bp, Unknown
  Description of Unknown: gRNA target site sequence
gcgtcccgagggcgtgcctg

SEQ ID NO: 7687 - DNA, 20 bp, Unknown
  Description of Unknown: gRNA target site sequence
gtcccgagggcgtgcctgaa

SEQ ID NO: 7688 - DNA, 20 bp, Unknown
  Description of Unknown: gRNA target site sequence
cgagggcgtgcctgaagagc

SEQ ID NO: 7689 - DNA, 20 bp, Unknown
  Description of Unknown: gRNA target site sequence
gagggcgtgcctgaagagcc

SEQ ID NO: 7690 - DNA, 20 bp, Unknown
  Description of Unknown: gRNA target site sequence
gtgcctgaagagccgggaca

SEQ ID NO: 7691 - DNA, 20 bp, Unknown
  Description of Unknown: gRNA target site sequence
tgcctgaagagccgggacac

SEQ ID NO: 7692 - DNA, 20 bp, Unknown
  Description of Unknown: gRNA target site sequence
gcctgaagagccgggacacg

SEQ ID NO: 7693 - DNA, 20 bp, Unknown
  Description of Unknown: gRNA target site sequence
cctgaagagccgggacacgg

SEQ ID NO: 7694 - DNA, 20 bp, Unknown
  Description of Unknown: gRNA target site sequence
ctgaagagccgggacacggg

SEQ ID NO: 7695 - DNA, 20 bp, Unknown
  Description of Unknown: gRNA target site sequence
gaagagccgggacacggggg

SEQ ID NO: 7696 - DNA, 20 bp, Unknown
  Description of Unknown: gRNA target site sequence
agagccgggacacgggggga

SEQ ID NO: 7697 - DNA, 20 bp, Unknown
  Description of Unknown: gRNA target site sequence
gagccgggacacggggggag

SEQ ID NO: 7698 - DNA, 20 bp, Unknown
  Description of Unknown: gRNA target site sequence
gggacacggggggagaggct

SEQ ID NO: 7699 - DNA, 20 bp, Unknown
  Description of Unknown: gRNA target site sequence
ggctcccctcctgcctcgct

SEQ ID NO: 7700 - DNA, 20 bp, Unknown
  Description of Unknown: gRNA target site sequence
agctccccctcccctgtgac

SEQ ID NO: 7701 - DNA, 20 bp, Unknown
  Description of Unknown: gRNA target site sequence
acgagcgcccctctgccctc

SEQ ID NO: 7702 - DNA, 20 bp, Unknown
  Description of Unknown: gRNA target site sequence
tctgccctctggttcccccg

SEQ ID NO: 7703 - DNA, 20 bp, Unknown
  Description of Unknown: gRNA target site sequence
ttcccccgcagtcgtctccc

SEQ ID NO: 7704 - DNA, 20 bp, Unknown
  Description of Unknown: gRNA target site sequence
tcccccgcagtcgtctccct

SEQ ID NO: 7705 - DNA, 20 bp, Unknown
  Description of Unknown: gRNA target site sequence
cgtctccctgggatgccttt

SEQ ID NO: 7706 - DNA, 20 bp, Unknown
  Description of Unknown: gRNA target site sequence
tttgctctttgccttttgcc

SEQ ID NO: 7707 - DNA, 20 bp, Unknown
  Description of Unknown: gRNA target site sequence
tgccttttgcccagaatctc

SEQ ID NO: 7708 - DNA, 20 bp, Unknown
  Description of Unknown: gRNA target site sequence
tgcccagaatctccagttct

SEQ ID NO: 7709 - DNA, 20 bp, Unknown
  Description of Unknown: gRNA target site sequence
aatctccagttctgagtcct

SEQ ID NO: 7710 - DNA, 20 bp, Unknown
  Description of Unknown: gRNA target site sequence
tctgagtcctgagtgaccca

SEQ ID NO: 7711 - DNA, 20 bp, Unknown
  Description of Unknown: gRNA target site sequence
ctgagtcctgagtgacccac

SEQ ID NO: 7712 - DNA, 20 bp, Unknown
  Description of Unknown: gRNA target site sequence
gtgacccacgggccaacctt

SEQ ID NO: 7713 - DNA, 20 bp, Unknown
  Description of Unknown: gRNA target site sequence
gacccacgggccaaccttaa

SEQ ID NO: 7714 - DNA, 20 bp, Unknown
  Description of Unknown: gRNA target site sequence
acccacgggccaaccttaag

SEQ ID NO: 7715 - DNA, 20 bp, Unknown
  Description of Unknown: gRNA target site sequence
cacgggccaaccttaagagg

SEQ ID NO: 7716 - DNA, 20 bp, Unknown
  Description of Unknown: gRNA target site sequence
caaccttaagaggtggcgct

SEQ ID NO: 7717 - DNA, 20 bp, Unknown
  Description of Unknown: gRNA target site sequence
aaccttaagaggtggcgctg

SEQ ID NO: 7718 - DNA, 20 bp, Unknown
  Description of Unknown: gRNA target site sequence
cttaagaggtggcgctgagg

SEQ ID NO: 7719 - DNA, 20 bp, Unknown
  Description of Unknown: gRNA target site sequence
ttaagaggtggcgctgaggc

SEQ ID NO: 7720 - DNA, 20 bp, Unknown
  Description of Unknown: gRNA target site sequence
agaggtggcgctgaggcagg

SEQ ID NO: 7721 - DNA, 20 bp, Unknown
  Description of Unknown: gRNA target site sequence
gaggtggcgctgaggcagga

SEQ ID NO: 7722 - DNA, 20 bp, Unknown
  Description of Unknown: gRNA target site sequence
ggcgctgaggcaggaaggca

SEQ ID NO: 7723 - DNA, 20 bp, Unknown
  Description of Unknown: gRNA target site sequence
caggaaggcacggccctgac

SEQ ID NO: 7724 - DNA, 20 bp, Unknown
  Description of Unknown: gRNA target site sequence
aggaaggcacggccctgaca

SEQ ID NO: 7725 - DNA, 20 bp, Unknown
  Description of Unknown: gRNA target site sequence
ccctgacaaggatgctgcct

SEQ ID NO: 7726 - DNA, 20 bp, Unknown
  Description of Unknown: gRNA target site sequence
cctgacaaggatgctgcctc

SEQ ID NO: 7727 - DNA, 20 bp, Unknown
  Description of Unknown: gRNA target site sequence
aaggatgctgcctcaggtgc

SEQ ID NO: 7728 - DNA, 20 bp, Unknown
  Description of Unknown: gRNA target site sequence
aggatgctgcctcaggtgcc

SEQ ID NO: 7729 - DNA, 20 bp, Unknown
  Description of Unknown: gRNA target site sequence
ggatgctgcctcaggtgccg

SEQ ID NO: 7730 - DNA, 20 bp, Unknown
  Description of Unknown: gRNA target site sequence
atgctgcctcaggtgccggg

SEQ ID NO: 7731 - DNA, 20 bp, Unknown
  Description of Unknown: gRNA target site sequence
ctgcctcaggtgccggggag

SEQ ID NO: 7732 - DNA, 20 bp, Unknown
  Description of Unknown: gRNA target site sequence
tgcctcaggtgccggggagc

SEQ ID NO: 7733 - DNA, 20 bp, Unknown
  Description of Unknown: gRNA target site sequence
aggtgccggggagcaggccc

SEQ ID NO: 7734 - DNA, 20 bp, Unknown
  Description of Unknown: gRNA target site sequence
ggtgccggggagcaggcccc

SEQ ID NO: 7735 - DNA, 20 bp, Unknown
  Description of Unknown: gRNA target site sequence
tgccggggagcaggccccgg

SEQ ID NO: 7736 - DNA, 20 bp, Unknown
  Description of Unknown: gRNA target site sequence
ccggggagcaggccccggga

SEQ ID NO: 7737 - DNA, 20 bp, Unknown
  Description of Unknown: gRNA target site sequence
cggggagcaggccccgggag

SEQ ID NO: 7738 - DNA, 20 bp, Unknown
  Description of Unknown: gRNA target site sequence
ggggagcaggccccgggaga

SEQ ID NO: 7739 - DNA, 20 bp, Unknown
  Description of Unknown: gRNA target site sequence
gggagcaggccccgggagag

SEQ ID NO: 7740 - DNA, 20 bp, Unknown
  Description of Unknown: gRNA target site sequence
caggccccgggagaggggcc

SEQ ID NO: 7741 - DNA, 20 bp, Unknown
  Description of Unknown: gRNA target site sequence
aggccccgggagaggggccg

SEQ ID NO: 7742 - DNA, 20 bp, Unknown
  Description of Unknown: gRNA target site sequence
ccccgggagaggggccgagg

SEQ ID NO: 7743 - DNA, 20 bp, Unknown
  Description of Unknown: gRNA target site sequence
cccgggagaggggccgaggt

SEQ ID NO: 7744 - DNA, 20 bp, Unknown
  Description of Unknown: gRNA target site sequence
ccgggagaggggccgaggtg

SEQ ID NO: 7745 - DNA, 20 bp, Unknown
  Description of Unknown: gRNA target site sequence
gggccgaggtggggaacccc

SEQ ID NO: 7746 - DNA, 20 bp, Unknown
  Description of Unknown: gRNA target site sequence
gaacccccagtcgcctgcca

SEQ ID NO: 7747 - DNA, 20 bp, Unknown
  Description of Unknown: gRNA target site sequence
cccagtcgcctgccacagtg

SEQ ID NO: 7748 - DNA, 20 bp, Unknown
  Description of Unknown: gRNA target site sequence
ccagtcgcctgccacagtga

SEQ ID NO: 7749 - DNA, 20 bp, Unknown
  Description of Unknown: gRNA target site sequence
cagtcgcctgccacagtgaa

SEQ ID NO: 7750 - DNA, 20 bp, Unknown
  Description of Unknown: gRNA target site sequence
agtcgcctgccacagtgaag

SEQ ID NO: 7751 - DNA, 20 bp, Unknown
  Description of Unknown: gRNA target site sequence
ctgccacagtgaaggggcac

SEQ ID NO: 7752 - DNA, 20 bp, Unknown
  Description of Unknown: gRNA target site sequence
tgccacagtgaaggggcacc

SEQ ID NO: 7753 - DNA, 20 bp, Unknown
  Description of Unknown: gRNA target site sequence
tgaaggggcaccaggacccc

SEQ ID NO: 7754 - DNA, 20 bp, Unknown
  Description of Unknown: gRNA target site sequence
gaaggggcaccaggaccccc

SEQ ID NO: 7755 - DNA, 20 bp, Unknown
  Description of Unknown: gRNA target site sequence
aaggggcaccaggacccccg

SEQ ID NO: 7756 - DNA, 20 bp, Unknown
  Description of Unknown: gRNA target site sequence
gggcaccaggacccccgggg

SEQ ID NO: 7757 - DNA, 20 bp, Unknown
  Description of Unknown: gRNA target site sequence
ggcaccaggacccccggggc

SEQ ID NO: 7758 - DNA, 20 bp, Unknown
  Description of Unknown: gRNA target site sequence
caccaggacccccggggcag

SEQ ID NO: 7759 - DNA, 20 bp, Unknown
  Description of Unknown: gRNA target site sequence
acccccggggcaggagcctc

SEQ ID NO: 7760 - DNA, 20 bp, Unknown
  Description of Unknown: gRNA target site sequence
cccccggggcaggagcctcg

SEQ ID NO: 7761 - DNA, 20 bp, Unknown
  Description of Unknown: gRNA target site sequence
ccccggggcaggagcctcga

SEQ ID NO: 7762 - DNA, 20 bp, Unknown
  Description of Unknown: gRNA target site sequence
cccggggcaggagcctcgag

SEQ ID NO: 7763 - DNA, 20 bp, Unknown
  Description of Unknown: gRNA target site sequence
ccggggcaggagcctcgagg

SEQ ID NO: 7764 - DNA, 20 bp, Unknown
  Description of Unknown: gRNA target site sequence
caggagcctcgagggggtgt

SEQ ID NO: 7765 - DNA, 20 bp, Unknown
  Description of Unknown: gRNA target site sequence
aggagcctcgagggggtgtc

SEQ ID NO: 7766 - DNA, 20 bp, Unknown
  Description of Unknown: gRNA target site sequence
ggagcctcgagggggtgtca

SEQ ID NO: 7767 - DNA, 20 bp, Unknown
  Description of Unknown: gRNA target site sequence
gcctcgagggggtgtcaggg

SEQ ID NO: 7768 - DNA, 20 bp, Unknown
  Description of Unknown: gRNA target site sequence
agggggtgtcagggcggccc

SEQ ID NO: 7769 - DNA, 20 bp, Unknown
  Description of Unknown: gRNA target site sequence
gggggtgtcagggcggcccc

SEQ ID NO: 7770 - DNA, 20 bp, Unknown
  Description of Unknown: gRNA target site sequence
ggggtgtcagggcggcccca

SEQ ID NO: 7771 - DNA, 20 bp, Unknown
  Description of Unknown: gRNA target site sequence
gggtgtcagggcggccccag

SEQ ID NO: 7772 - DNA, 20 bp, Unknown
  Description of Unknown: gRNA target site sequence
tgcccctcatcttgtcctcc

SEQ ID NO: 7773 - DNA, 20 bp, Unknown
  Description of Unknown: gRNA target site sequence
ccctcatcttgtcctcccag

SEQ ID NO: 7774 - DNA, 20 bp, Unknown
  Description of Unknown: gRNA target site sequence
ctcccagtggtgtcacaccc

SEQ ID NO: 7775 - DNA, 20 bp, Unknown
  Description of Unknown: gRNA target site sequence
tggtgtcacaccccggtacc

SEQ ID NO: 7776 - DNA, 20 bp, Unknown
  Description of Unknown: gRNA target site sequence
tgtcacaccccggtacccag

SEQ ID NO: 7777 - DNA, 20 bp, Unknown
  Description of Unknown: gRNA target site sequence
gtcacaccccggtacccagc

SEQ ID NO: 7778 - DNA, 20 bp, Unknown
  Description of Unknown: gRNA target site sequence
tcacaccccggtacccagca

SEQ ID NO: 7779 - DNA, 20 bp, Unknown
  Description of Unknown: gRNA target site sequence
ccccggtacccagcagggcc

SEQ ID NO: 7780 - DNA, 20 bp, Unknown
  Description of Unknown: gRNA target site sequence
ccggtacccagcagggccca

SEQ ID NO: 7781 - DNA, 20 bp, Unknown
  Description of Unknown: gRNA target site sequence
cggtacccagcagggcccag

SEQ ID NO: 7782 - DNA, 20 bp, Unknown
  Description of Unknown: gRNA target site sequence
ggtacccagcagggcccaga

SEQ ID NO: 7783 - DNA, 20 bp, Unknown
  Description of Unknown: gRNA target site sequence
agggcccagagggactgtct

SEQ ID NO: 7784 - DNA, 20 bp, Unknown
  Description of Unknown: gRNA target site sequence
gggcccagagggactgtctt

SEQ ID NO: 7785 - DNA, 20 bp, Unknown
  Description of Unknown: gRNA target site sequence
cagagggactgtcttaggct

SEQ ID NO: 7786 - DNA, 20 bp, Unknown
  Description of Unknown: gRNA target site sequence
ggactgtcttaggcttggcc

SEQ ID NO: 7787 - DNA, 20 bp, Unknown
  Description of Unknown: gRNA target site sequence
gactgtcttaggcttggcct

SEQ ID NO: 7788 - DNA, 20 bp, Unknown
  Description of Unknown: gRNA target site sequence
ctgggtgaaaccaccctccc

SEQ ID NO: 7789 - DNA, 20 bp, Unknown
  Description of Unknown: gRNA target site sequence
tgggtgaaaccaccctcccc

SEQ ID NO: 7790 - DNA, 20 bp, Unknown
  Description of Unknown: gRNA target site sequence
aaaccaccctccccaggcct

SEQ ID NO: 7791 - DNA, 20 bp, Unknown
  Description of Unknown: gRNA target site sequence
tccccaggccttggcatccc

SEQ ID NO: 7792 - DNA, 20 bp, Unknown
  Description of Unknown: gRNA target site sequence
ccccaggccttggcatcccc

SEQ ID NO: 7793 - DNA, 20 bp, Unknown
  Description of Unknown: gRNA target site sequence
ggccttggcatccccaggtg

SEQ ID NO: 7794 - DNA, 20 bp, Unknown
  Description of Unknown: gRNA target site sequence
gccttggcatccccaggtgc

SEQ ID NO: 7795 - DNA, 20 bp, Unknown
  Description of Unknown: gRNA target site sequence
tggcatccccaggtgcaggc

SEQ ID NO: 7796 - DNA, 20 bp, Unknown
  Description of Unknown: gRNA target site sequence
atccccaggtgcaggctggc

SEQ ID NO: 7797 - DNA, 20 bp, Unknown
  Description of Unknown: gRNA target site sequence
tccccaggtgcaggctggct

SEQ ID NO: 7798 - DNA, 20 bp, Unknown
  Description of Unknown: gRNA target site sequence
aggtgcaggctggctgggca

SEQ ID NO: 7799 - DNA, 20 bp, Unknown
  Description of Unknown: gRNA target site sequence
gtgcaggctggctgggcaca

SEQ ID NO: 7800 - DNA, 20 bp, Unknown
  Description of Unknown: gRNA target site sequence
tgcaggctggctgggcacag

SEQ ID NO: 7801 - DNA, 20 bp, Unknown
  Description of Unknown: gRNA target site sequence
gcaggctggctgggcacaga

SEQ ID NO: 7802 - DNA, 20 bp, Unknown
  Description of Unknown: gRNA target site sequence
gctggctgggcacagagggc

SEQ ID NO: 7803 - DNA, 20 bp, Unknown
  Description of Unknown: gRNA target site sequence
gctgggcacagagggccagc

SEQ ID NO: 7804 - DNA, 20 bp, Unknown
  Description of Unknown: gRNA target site sequence
ctgggcacagagggccagcc

SEQ ID NO: 7805 - DNA, 20 bp, Unknown
  Description of Unknown: gRNA target site sequence
cacagagggccagccgggca

SEQ ID NO: 7806 - DNA, 20 bp, Unknown
  Description of Unknown: gRNA target site sequence
cagagggccagccgggcaca

SEQ ID NO: 7807 - DNA, 20 bp, Unknown
  Description of Unknown: gRNA target site sequence
agagggccagccgggcacag

SEQ ID NO: 7808 - DNA, 20 bp, Unknown
  Description of Unknown: gRNA target site sequence
gagggccagccgggcacaga

SEQ ID NO: 7809 - DNA, 20 bp, Unknown
  Description of Unknown: gRNA target site sequence
ccagccgggcacagagggtc

SEQ ID NO: 7810 - DNA, 20 bp, Unknown
  Description of Unknown: gRNA target site sequence
cagccgggcacagagggtcc

SEQ ID NO: 7811 - DNA, 20 bp, Unknown
  Description of Unknown: gRNA target site sequence
gccgggcacagagggtccag

SEQ ID NO: 7812 - DNA, 20 bp, Unknown
  Description of Unknown: gRNA target site sequence
gggcacagagggtccaggag

SEQ ID NO: 7813 - DNA, 20 bp, Unknown
  Description of Unknown: gRNA target site sequence
ggcacagagggtccaggagc

SEQ ID NO: 7814 - DNA, 20 bp, Unknown
  Description of Unknown: gRNA target site sequence
gagggtccaggagcgggctg

SEQ ID NO: 7815 - DNA, 20 bp, Unknown
  Description of Unknown: gRNA target site sequence
ccaggagcgggctgtggtca

SEQ ID NO: 7816 - DNA, 20 bp, Unknown
  Description of Unknown: gRNA target site sequence
ggctgtggtcacagtgtaca

SEQ ID NO: 7817 - DNA, 20 bp, Unknown
  Description of Unknown: gRNA target site sequence
ctgtggtcacagtgtacaca

SEQ ID NO: 7818 - DNA, 20 bp, Unknown
  Description of Unknown: gRNA target site sequence
tgtggtcacagtgtacacag

SEQ ID NO: 7819 - DNA, 20 bp, Unknown
  Description of Unknown: gRNA target site sequence
gtggtcacagtgtacacaga

SEQ ID NO: 7820 - DNA, 20 bp, Unknown
  Description of Unknown: gRNA target site sequence
cacagtgtacacagagggcc

SEQ ID NO: 7821 - DNA, 20 bp, Unknown
  Description of Unknown: gRNA target site sequence
acagtgtacacagagggccc

SEQ ID NO: 7822 - DNA, 20 bp, Unknown
  Description of Unknown: gRNA target site sequence
cagtgtacacagagggccca

SEQ ID NO: 7823 - DNA, 20 bp, Unknown
  Description of Unknown: gRNA target site sequence
acacagagggcccagggtca

SEQ ID NO: 7824 - DNA, 20 bp, Unknown
  Description of Unknown: gRNA target site sequence
cacagagggcccagggtcac

SEQ ID NO: 7825 - DNA, 20 bp, Unknown
  Description of Unknown: gRNA target site sequence
agagggcccagggtcacggg

SEQ ID NO: 7826 - DNA, 20 bp, Unknown
  Description of Unknown: gRNA target site sequence
gcccagggtcacgggcagcc

SEQ ID NO: 7827 - DNA, 20 bp, Unknown
  Description of Unknown: gRNA target site sequence
cccagggtcacgggcagccc

SEQ ID NO: 7828 - DNA, 20 bp, Unknown
  Description of Unknown: gRNA target site sequence
agggtcacgggcagcccagg

SEQ ID NO: 7829 - DNA, 20 bp, Unknown
  Description of Unknown: gRNA target site sequence
ggtcacgggcagcccaggaa

SEQ ID NO: 7830 - DNA, 20 bp, Unknown
  Description of Unknown: gRNA target site sequence
gtcacgggcagcccaggaag

SEQ ID NO: 7831 - DNA, 20 bp, Unknown
  Description of Unknown: gRNA target site sequence
ggctccctctctcctcgatc

SEQ ID NO: 7832 - DNA, 20 bp, Unknown
  Description of Unknown: gRNA target site sequence
gctccctctctcctcgatcc

SEQ ID NO: 7833 - DNA, 20 bp, Unknown
  Description of Unknown: gRNA target site sequence
tccctctctcctcgatccgg

SEQ ID NO: 7834 - DNA, 20 bp, Unknown
  Description of Unknown: gRNA target site sequence
cctctctcctcgatccggga

SEQ ID NO: 7835 - DNA, 20 bp, Unknown
  Description of Unknown: gRNA target site sequence
tctcctcgatccgggagagt

SEQ ID NO: 7836 - DNA, 20 bp, Unknown
  Description of Unknown: gRNA target site sequence
ctcctcgatccgggagagtg

SEQ ID NO: 7837 - DNA, 20 bp, Unknown
  Description of Unknown: gRNA target site sequence
cgatccgggagagtgaggcc

SEQ ID NO: 7838 - DNA, 20 bp, Unknown
  Description of Unknown: gRNA target site sequence
gatccgggagagtgaggcca

SEQ ID NO: 7839 - DNA, 20 bp, Unknown
  Description of Unknown: gRNA target site sequence
tgaggccaaggcctccccca

SEQ ID NO: 7840 - DNA, 20 bp, Unknown
  Description of Unknown: gRNA target site sequence
gccaaggcctcccccacgga

SEQ ID NO: 7841 - DNA, 20 bp, Unknown
  Description of Unknown: gRNA target site sequence
tcccccacggatggtctgaa

SEQ ID NO: 7842 - DNA, 20 bp, Unknown
  Description of Unknown: gRNA target site sequence
cccccacggatggtctgaac

SEQ ID NO: 7843 - DNA, 20 bp, Unknown
  Description of Unknown: gRNA target site sequence
ccccacggatggtctgaaca

SEQ ID NO: 7844 - DNA, 20 bp, Unknown
  Description of Unknown: gRNA target site sequence
cggatggtctgaacagggct

SEQ ID NO: 7845 - DNA, 20 bp, Unknown
  Description of Unknown: gRNA target site sequence
ggatggtctgaacagggctc

SEQ ID NO: 7846 - DNA, 20 bp, Unknown
  Description of Unknown: gRNA target site sequence
gatggtctgaacagggctcg

SEQ ID NO: 7847 - DNA, 20 bp, Unknown
  Description of Unknown: gRNA target site sequence
tggtctgaacagggctcggg

SEQ ID NO: 7848 - DNA, 20 bp, Unknown
  Description of Unknown: gRNA target site sequence
gtctgaacagggctcgggga

SEQ ID NO: 7849 - DNA, 20 bp, Unknown
  Description of Unknown: gRNA target site sequence
acagggctcggggagagccc

SEQ ID NO: 7850 - DNA, 20 bp, Unknown
  Description of Unknown: gRNA target site sequence
tcggggagagccctggaatc

SEQ ID NO: 7851 - DNA, 20 bp, Unknown
  Description of Unknown: gRNA target site sequence
cggggagagccctggaatct

SEQ ID NO: 7852 - DNA, 20 bp, Unknown
  Description of Unknown: gRNA target site sequence
ggagagccctggaatctggg

SEQ ID NO: 7853 - DNA, 20 bp, Unknown
  Description of Unknown: gRNA target site sequence
agagccctggaatctgggca

SEQ ID NO: 7854 - DNA, 20 bp, Unknown
  Description of Unknown: gRNA target site sequence
ctggaatctgggcagagacc

SEQ ID NO: 7855 - DNA, 20 bp, Unknown
  Description of Unknown: gRNA target site sequence
tggaatctgggcagagaccc

SEQ ID NO: 7856 - DNA, 20 bp, Unknown
  Description of Unknown: gRNA target site sequence
aatctgggcagagacccagg

SEQ ID NO: 7857 - DNA, 20 bp, Unknown
  Description of Unknown: gRNA target site sequence
atctgggcagagacccaggc

SEQ ID NO: 7858 - DNA, 20 bp, Unknown
  Description of Unknown: gRNA target site sequence
aggcgggcacaatccccacc

SEQ ID NO: 7859 - DNA, 20 bp, Unknown
  Description of Unknown: gRNA target site sequence
ggcgggcacaatccccaccc

SEQ ID NO: 7860 - DNA, 20 bp, Unknown
  Description of Unknown: gRNA target site sequence
cgggcacaatccccacccag

SEQ ID NO: 7861 - DNA, 20 bp, Unknown
  Description of Unknown: gRNA target site sequence
gggcacaatccccacccagg

SEQ ID NO: 7862 - DNA, 20 bp, Unknown
  Description of Unknown: gRNA target site sequence
ggcacaatccccacccagga

SEQ ID NO: 7863 - DNA, 20 bp, Unknown
  Description of Unknown: gRNA target site sequence
tccccacccaggagggatcc

SEQ ID NO: 7864 - DNA, 20 bp, Unknown
  Description of Unknown: gRNA target site sequence
cccacccaggagggatcctg

SEQ ID NO: 7865 - DNA, 20 bp, Unknown
  Description of Unknown: gRNA target site sequence
cccaggagggatcctggaga

SEQ ID NO: 7866 - DNA, 20 bp, Unknown
  Description of Unknown: gRNA target site sequence
aggagggatcctggagacag

SEQ ID NO: 7867 - DNA, 20 bp, Unknown
  Description of Unknown: gRNA target site sequence
aagaactgtcctcactcgaa

SEQ ID NO: 7868 - DNA, 20 bp, Unknown
  Description of Unknown: gRNA target site sequence
agaactgtcctcactcgaac

SEQ ID NO: 7869 - DNA, 20 bp, Unknown
  Description of Unknown: gRNA target site sequence
tcactcgaacaggtacactt

SEQ ID NO: 7870 - DNA, 20 bp, Unknown
  Description of Unknown: gRNA target site sequence
aggtacactttggatataat

SEQ ID NO: 7871 - DNA, 20 bp, Unknown
  Description of Unknown: gRNA target site sequence
tataatgagaaaaatatcac

SEQ ID NO: 7872 - DNA, 20 bp, Unknown
  Description of Unknown: gRNA target site sequence
atctaaactttgacgtcgta

SEQ ID NO: 7873 - DNA, 20 bp, Unknown
  Description of Unknown: gRNA target site sequence
aactttgacgtcgtaaagcc

SEQ ID NO: 7874 - DNA, 20 bp, Unknown
  Description of Unknown: gRNA target site sequence
actttgacgtcgtaaagcca

SEQ ID NO: 7875 - DNA, 20 bp, Unknown
  Description of Unknown: gRNA target site sequence
tgacgtcgtaaagccaaggt

SEQ ID NO: 7876 - DNA, 20 bp, Unknown
  Description of Unknown: gRNA target site sequence
aagccaaggttagtcccaca

SEQ ID NO: 7877 - DNA, 20 bp, Unknown
  Description of Unknown: gRNA target site sequence
agccaaggttagtcccacat

SEQ ID NO: 7878 - DNA, 20 bp, Unknown
  Description of Unknown: gRNA target site sequence
gccaaggttagtcccacatg

SEQ ID NO: 7879 - DNA, 20 bp, Unknown
  Description of Unknown: gRNA target site sequence
catggggctcatcccatcct

SEQ ID NO: 7880 - DNA, 20 bp, Unknown
  Description of Unknown: gRNA target site sequence
atggggctcatcccatcctt

SEQ ID NO: 7881 - DNA, 20 bp, Unknown
  Description of Unknown: gRNA target site sequence
tcccatccttaggaaaactc

SEQ ID NO: 7882 - DNA, 20 bp, Unknown
  Description of Unknown: gRNA target site sequence
atccttaggaaaactcgagt

SEQ ID NO: 7883 - DNA, 20 bp, Unknown
  Description of Unknown: gRNA target site sequence
tccttaggaaaactcgagtg

SEQ ID NO: 7884 - DNA, 20 bp, Unknown
  Description of Unknown: gRNA target site sequence
ggaaaactcgagtgaggacc

SEQ ID NO: 7885 - DNA, 20 bp, Unknown
  Description of Unknown: gRNA target site sequence
gaaaactcgagtgaggacca

SEQ ID NO: 7886 - DNA, 20 bp, Unknown
  Description of Unknown: gRNA target site sequence
gagtgaggaccaaggatgcc

SEQ ID NO: 7887 - DNA, 20 bp, Unknown
  Description of Unknown: gRNA target site sequence
agtgaggaccaaggatgcct

SEQ ID NO: 7888 - DNA, 20 bp, Unknown
  Description of Unknown: gRNA target site sequence
aggaccaaggatgcctgggc

SEQ ID NO: 7889 - DNA, 20 bp, Unknown
  Description of Unknown: gRNA target site sequence
ggaccaaggatgcctgggca

SEQ ID NO: 7890 - DNA, 20 bp, Unknown
  Description of Unknown: gRNA target site sequence
ccaaggatgcctgggcaagg

SEQ ID NO: 7891 - DNA, 20 bp, Unknown
  Description of Unknown: gRNA target site sequence
aaggatgcctgggcaaggca

SEQ ID NO: 7892 - DNA, 20 bp, Unknown
  Description of Unknown: gRNA target site sequence
ggcaaggcagagccgccacg

SEQ ID NO: 7893 - DNA, 20 bp, Unknown
  Description of Unknown: gRNA target site sequence
gccgccacgcagactcccca

SEQ ID NO: 7894 - DNA, 20 bp, Unknown
  Description of Unknown: gRNA target site sequence
cacgcagactccccacggcc

SEQ ID NO: 7895 - DNA, 20 bp, Unknown
  Description of Unknown: gRNA target site sequence
acgcagactccccacggcca

SEQ ID NO: 7896 - DNA, 20 bp, Unknown
  Description of Unknown: gRNA target site sequence
gactccccacggccaaggtt

SEQ ID NO: 7897 - DNA, 20 bp, Unknown
  Description of Unknown: gRNA target site sequence
actccccacggccaaggttt

SEQ ID NO: 7898 - DNA, 20 bp, Unknown
  Description of Unknown: gRNA target site sequence
ctccccacggccaaggtttg

SEQ ID NO: 7899 - DNA, 20 bp, Unknown
  Description of Unknown: gRNA target site sequence
acggccaaggtttggggttc

SEQ ID NO: 7900 - DNA, 20 bp, Unknown
  Description of Unknown: gRNA target site sequence
ccaaggtttggggttctggc

SEQ ID NO: 7901 - DNA, 20 bp, Unknown
  Description of Unknown: gRNA target site sequence
cagcctgacccgtcattcta

SEQ ID NO: 7902 - DNA, 20 bp, Unknown
  Description of Unknown: gRNA target site sequence
cgtcattctacagaaacacg

SEQ ID NO: 7903 - DNA, 20 bp, Unknown
  Description of Unknown: gRNA target site sequence
ctacagaaacacgcagcccc

SEQ ID NO: 7904 - DNA, 20 bp, Unknown
  Description of Unknown: gRNA target site sequence
tacagaaacacgcagcccca

SEQ ID NO: 7905 - DNA, 20 bp, Unknown
  Description of Unknown: gRNA target site sequence
aaacacgcagccccaaggac

SEQ ID NO: 7906 - DNA, 20 bp, Unknown
  Description of Unknown: gRNA target site sequence
cgcagccccaaggaccggct

SEQ ID NO: 7907 - DNA, 20 bp, Unknown
  Description of Unknown: gRNA target site sequence
cagccccaaggaccggctga

SEQ ID NO: 7908 - DNA, 20 bp, Unknown
  Description of Unknown: gRNA target site sequence
agccccaaggaccggctgag

SEQ ID NO: 7909 - DNA, 20 bp, Unknown
  Description of Unknown: gRNA target site sequence
gccccaaggaccggctgaga

SEQ ID NO: 7910 - DNA, 20 bp, Unknown
  Description of Unknown: gRNA target site sequence
ccccaaggaccggctgagag

SEQ ID NO: 7911 - DNA, 20 bp, Unknown
  Description of Unknown: gRNA target site sequence
aaggaccggctgagagggga

SEQ ID NO: 7912 - DNA, 20 bp, Unknown
  Description of Unknown: gRNA target site sequence
ggaccggctgagaggggaca

SEQ ID NO: 7913 - DNA, 20 bp, Unknown
  Description of Unknown: gRNA target site sequence
gaccggctgagaggggacag

SEQ ID NO: 7914 - DNA, 20 bp, Unknown
  Description of Unknown: gRNA target site sequence
ggacagaggtcctgcctgcc

SEQ ID NO: 7915 - DNA, 20 bp, Unknown
  Description of Unknown: gRNA target site sequence
gacagaggtcctgcctgccc

SEQ ID NO: 7916 - DNA, 20 bp, Unknown
  Description of Unknown: gRNA target site sequence
cagaggtcctgcctgcccag

SEQ ID NO: 7917 - DNA, 20 bp, Unknown
  Description of Unknown: gRNA target site sequence
gtcctgcctgcccaggagca

SEQ ID NO: 7918 - DNA, 20 bp, Unknown
  Description of Unknown: gRNA target site sequence
cctgcctgcccaggagcaaa

SEQ ID NO: 7919 - DNA, 20 bp, Unknown
  Description of Unknown: gRNA target site sequence
ctgcctgcccaggagcaaag

SEQ ID NO: 7920 - DNA, 20 bp, Unknown
  Description of Unknown: gRNA target site sequence
tgcctgcccaggagcaaaga

SEQ ID NO: 7921 - DNA, 20 bp, Unknown
  Description of Unknown: gRNA target site sequence
gcctgcccaggagcaaagag

SEQ ID NO: 7922 - DNA, 20 bp, Unknown
  Description of Unknown: gRNA target site sequence
ccaggagcaaagaggggact

SEQ ID NO: 7923 - DNA, 20 bp, Unknown
  Description of Unknown: gRNA target site sequence
caggagcaaagaggggactt

SEQ ID NO: 7924 - DNA, 20 bp, Unknown
  Description of Unknown: gRNA target site sequence
agcaaagaggggacttgggc

SEQ ID NO: 7925 - DNA, 20 bp, Unknown
  Description of Unknown: gRNA target site sequence
gcaaagaggggacttgggcc

SEQ ID NO: 7926 - DNA, 20 bp, Unknown
  Description of Unknown: gRNA target site sequence
caaagaggggacttgggcca

SEQ ID NO: 7927 - DNA, 20 bp, Unknown
  Description of Unknown: gRNA target site sequence
aaagaggggacttgggccag

SEQ ID NO: 7928 - DNA, 20 bp, Unknown
  Description of Unknown: gRNA target site sequence
agaggggacttgggccaggg

SEQ ID NO: 7929 - DNA, 20 bp, Unknown
  Description of Unknown: gRNA target site sequence
gaggggacttgggccagggg

SEQ ID NO: 7930 - DNA, 20 bp, Unknown
  Description of Unknown: gRNA target site sequence
ggggacttgggccaggggag

SEQ ID NO: 7931 - DNA, 20 bp, Unknown
  Description of Unknown: gRNA target site sequence
acttgggccaggggaggagt

SEQ ID NO: 7932 - DNA, 20 bp, Unknown
  Description of Unknown: gRNA target site sequence
cttgggccaggggaggagtt

SEQ ID NO: 7933 - DNA, 20 bp, Unknown
  Description of Unknown: gRNA target site sequence
ttgggccaggggaggagttg

SEQ ID NO: 7934 - DNA, 20 bp, Unknown
  Description of Unknown: gRNA target site sequence
ccaggggaggagttggggcc

SEQ ID NO: 7935 - DNA, 20 bp, Unknown
  Description of Unknown: gRNA target site sequence
aggggaggagttggggccca

SEQ ID NO: 7936 - DNA, 20 bp, Unknown
  Description of Unknown: gRNA target site sequence
gggaggagttggggcccaga

SEQ ID NO: 7937 - DNA, 20 bp, Unknown
  Description of Unknown: gRNA target site sequence
ggaggagttggggcccagag

SEQ ID NO: 7938 - DNA, 20 bp, Unknown
  Description of Unknown: gRNA target site sequence
ttggggcccagagaggaacc

SEQ ID NO: 7939 - DNA, 20 bp, Unknown
  Description of Unknown: gRNA target site sequence
tggggcccagagaggaaccc

SEQ ID NO: 7940 - DNA, 20 bp, Unknown
  Description of Unknown: gRNA target site sequence
gggcccagagaggaacccag

SEQ ID NO: 7941 - DNA, 20 bp, Unknown
  Description of Unknown: gRNA target site sequence
agagaggaacccaggagttc

SEQ ID NO: 7942 - DNA, 20 bp, Unknown
  Description of Unknown: gRNA target site sequence
ccaggagttcgagctgccca

SEQ ID NO: 7943 - DNA, 20 bp, Unknown
  Description of Unknown: gRNA target site sequence
tcgagctgcccaaagccaca

SEQ ID NO: 7944 - DNA, 20 bp, Unknown
  Description of Unknown: gRNA target site sequence
ctgcccaaagccacacagct

SEQ ID NO: 7945 - DNA, 20 bp, Unknown
  Description of Unknown: gRNA target site sequence
tgcccaaagccacacagctc

SEQ ID NO: 7946 - DNA, 20 bp, Unknown
  Description of Unknown: gRNA target site sequence
gcccaaagccacacagctca

SEQ ID NO: 7947 - DNA, 20 bp, Unknown
  Description of Unknown: gRNA target site sequence
aaagccacacagctcagggt

SEQ ID NO: 7948 - DNA, 20 bp, Unknown
  Description of Unknown: gRNA target site sequence
aagccacacagctcagggta

SEQ ID NO: 7949 - DNA, 20 bp, Unknown
  Description of Unknown: gRNA target site sequence
agccacacagctcagggtaa

SEQ ID NO: 7950 - DNA, 20 bp, Unknown
  Description of Unknown: gRNA target site sequence
gccacacagctcagggtaag

SEQ ID NO: 7951 - DNA, 20 bp, Unknown
  Description of Unknown: gRNA target site sequence
acacagctcagggtaagggg

SEQ ID NO: 7952 - DNA, 20 bp, Unknown
  Description of Unknown: gRNA target site sequence
acagctcagggtaaggggca

SEQ ID NO: 7953 - DNA, 20 bp, Unknown
  Description of Unknown: gRNA target site sequence
ctcagggtaaggggcagagc

SEQ ID NO: 7954 - DNA, 20 bp, Unknown
  Description of Unknown: gRNA target site sequence
tcagggtaaggggcagagct

SEQ ID NO: 7955 - DNA, 20 bp, Unknown
  Description of Unknown: gRNA target site sequence
cagggtaaggggcagagctg

SEQ ID NO: 7956 - DNA, 20 bp, Unknown
  Description of Unknown: gRNA target site sequence
agggtaaggggcagagctgg

SEQ ID NO: 7957 - DNA, 20 bp, Unknown
  Description of Unknown: gRNA target site sequence
aaggggcagagctgggggcc

SEQ ID NO: 7958 - DNA, 20 bp, Unknown
  Description of Unknown: gRNA target site sequence
aggggcagagctgggggcca

SEQ ID NO: 7959 - DNA, 20 bp, Unknown
  Description of Unknown: gRNA target site sequence
gcagagctgggggccaaggc

SEQ ID NO: 7960 - DNA, 20 bp, Unknown
  Description of Unknown: gRNA target site sequence
cagagctgggggccaaggct

SEQ ID NO: 7961 - DNA, 20 bp, Unknown
  Description of Unknown: gRNA target site sequence
ggccaaggctgggcctgcca

SEQ ID NO: 7962 - DNA, 20 bp, Unknown
  Description of Unknown: gRNA target site sequence
cacagcaccccccgacctgc

SEQ ID NO: 7963 - DNA, 20 bp, Unknown
  Description of Unknown: gRNA target site sequence
acagcaccccccgacctgcc

SEQ ID NO: 7964 - DNA, 20 bp, Unknown
  Description of Unknown: gRNA target site sequence
cagcaccccccgacctgcca

SEQ ID NO: 7965 - DNA, 20 bp, Unknown
  Description of Unknown: gRNA target site sequence
cccccgacctgccagggact

SEQ ID NO: 7966 - DNA, 20 bp, Unknown
  Description of Unknown: gRNA target site sequence
cccgacctgccagggactga

SEQ ID NO: 7967 - DNA, 20 bp, Unknown
  Description of Unknown: gRNA target site sequence
ctgccagggactgagagtga

SEQ ID NO: 7968 - DNA, 20 bp, Unknown
  Description of Unknown: gRNA target site sequence
tgccagggactgagagtgaa

SEQ ID NO: 7969 - DNA, 20 bp, Unknown
  Description of Unknown: gRNA target site sequence
ctgagagtgaaaggtccctc

SEQ ID NO: 7970 - DNA, 20 bp, Unknown
  Description of Unknown: gRNA target site sequence
tccctccagacccctcgctc

SEQ ID NO: 7971 - DNA, 20 bp, Unknown
  Description of Unknown: gRNA target site sequence
ccctccagacccctcgctcc

SEQ ID NO: 7972 - DNA, 20 bp, Unknown
  Description of Unknown: gRNA target site sequence
acccctcgctccgggacccc

SEQ ID NO: 7973 - DNA, 20 bp, Unknown
  Description of Unknown: gRNA target site sequence
cccctcgctccgggacccct

SEQ ID NO: 7974 - DNA, 20 bp, Unknown
  Description of Unknown: gRNA target site sequence
ctccgggacccctgggctgc

SEQ ID NO: 7975 - DNA, 20 bp, Unknown
  Description of Unknown: gRNA target site sequence
tccgggacccctgggctgcc

SEQ ID NO: 7976 - DNA, 20 bp, Unknown
  Description of Unknown: gRNA target site sequence
ccgggacccctgggctgcca

SEQ ID NO: 7977 - DNA, 20 bp, Unknown
  Description of Unknown: gRNA target site sequence
gacccctgggctgccagggc

SEQ ID NO: 7978 - DNA, 20 bp, Unknown
  Description of Unknown: gRNA target site sequence
acccctgggctgccagggcc

SEQ ID NO: 7979 - DNA, 20 bp, Unknown
  Description of Unknown: gRNA target site sequence
tgccagggccaggcccgcct

SEQ ID NO: 7980 - DNA, 20 bp, Unknown
  Description of Unknown: gRNA target site sequence
ctcagcaccccccgacctgc

SEQ ID NO: 7981 - DNA, 20 bp, Unknown
  Description of Unknown: gRNA target site sequence
tcagcaccccccgacctgcc

SEQ ID NO: 7982 - DNA, 20 bp, Unknown
  Description of Unknown: gRNA target site sequence
cagcaccccccgacctgcca

SEQ ID NO: 7983 - DNA, 20 bp, Unknown
  Description of Unknown: gRNA target site sequence
cccccgacctgccagggact

SEQ ID NO: 7984 - DNA, 20 bp, Unknown
  Description of Unknown: gRNA target site sequence
ccccgacctgccagggactg

SEQ ID NO: 7985 - DNA, 20 bp, Unknown
  Description of Unknown: gRNA target site sequence
cccgacctgccagggactga

SEQ ID NO: 7986 - DNA, 20 bp, Unknown
  Description of Unknown: gRNA target site sequence
gacctgccagggactgaggg

SEQ ID NO: 7987 - DNA, 20 bp, Unknown
  Description of Unknown: gRNA target site sequence
ctgccagggactgagggtgg

SEQ ID NO: 7988 - DNA, 20 bp, Unknown
  Description of Unknown: gRNA target site sequence
tgccagggactgagggtgga

SEQ ID NO: 7989 - DNA, 20 bp, Unknown
  Description of Unknown: gRNA target site sequence
ctgagggtggaaggtccctc

SEQ ID NO: 7990 - DNA, 20 bp, Unknown
  Description of Unknown: gRNA target site sequence
ggaaggtccctccagacccc

SEQ ID NO: 7991 - DNA, 20 bp, Unknown
  Description of Unknown: gRNA target site sequence
tccctccagacccctggctc

SEQ ID NO: 7992 - DNA, 20 bp, Unknown
  Description of Unknown: gRNA target site sequence
ccctccagacccctggctct

SEQ ID NO: 7993 - DNA, 20 bp, Unknown
  Description of Unknown: gRNA target site sequence
accgccgaccccacctacct

SEQ ID NO: 7994 - DNA, 20 bp, Unknown
  Description of Unknown: gRNA target site sequence
cacctacctaagaaccatcc

SEQ ID NO: 7995 - DNA, 20 bp, Unknown
  Description of Unknown: gRNA target site sequence
ctaagaaccatcctggccgc

SEQ ID NO: 7996 - DNA, 20 bp, Unknown
  Description of Unknown: gRNA target site sequence
aaccatcctggccgccagcc

SEQ ID NO: 7997 - DNA, 20 bp, Unknown
  Description of Unknown: gRNA target site sequence
cctggccgccagcccagttg

SEQ ID NO: 7998 - DNA, 20 bp, Unknown
  Description of Unknown: gRNA target site sequence
agcccagttgtagcaccgcc

SEQ ID NO: 7999 - DNA, 20 bp, Unknown
  Description of Unknown: gRNA target site sequence
tgtagcaccgcccagacgac

SEQ ID NO: 8000 - DNA, 20 bp, Unknown
  Description of Unknown: gRNA target site sequence
gcaccgcccagacgactggc

SEQ ID NO: 8001 - DNA, 20 bp, Unknown
  Description of Unknown: gRNA target site sequence
caccgcccagacgactggcc

SEQ ID NO: 8002 - DNA, 20 bp, Unknown
  Description of Unknown: gRNA target site sequence
accgcccagacgactggcca

SEQ ID NO: 8003 - DNA, 20 bp, Unknown
  Description of Unknown: gRNA target site sequence
acgactggccagggcgcctg

SEQ ID NO: 8004 - DNA, 20 bp, Unknown
  Description of Unknown: gRNA target site sequence
cgactggccagggcgcctgt

SEQ ID NO: 8005 - DNA, 20 bp, Unknown
  Description of Unknown: gRNA target site sequence
gcctgtgggatctgcatgcc

SEQ ID NO: 8006 - DNA, 20 bp, Unknown
  Description of Unknown: gRNA target site sequence
ctgtgggatctgcatgcctg

SEQ ID NO: 8007 - DNA, 20 bp, Unknown
  Description of Unknown: gRNA target site sequence
tgggatctgcatgcctggag

SEQ ID NO: 8008 - DNA, 20 bp, Unknown
  Description of Unknown: gRNA target site sequence
catgcctggagcagccccac

SEQ ID NO: 8009 - DNA, 20 bp, Unknown
  Description of Unknown: gRNA target site sequence
tgcctggagcagccccacca

SEQ ID NO: 8010 - DNA, 20 bp, Unknown
  Description of Unknown: gRNA target site sequence
gtgccgccttctccactgct

SEQ ID NO: 8011 - DNA, 20 bp, Unknown
  Description of Unknown: gRNA target site sequence
tgccgccttctccactgctc

SEQ ID NO: 8012 - DNA, 20 bp, Unknown
  Description of Unknown: gRNA target site sequence
cgccttctccactgctcagg

SEQ ID NO: 8013 - DNA, 20 bp, Unknown
  Description of Unknown: gRNA target site sequence
ccttctccactgctcaggcg

SEQ ID NO: 8014 - DNA, 20 bp, Unknown
  Description of Unknown: gRNA target site sequence
cttctccactgctcaggcgg

SEQ ID NO: 8015 - DNA, 20 bp, Unknown
  Description of Unknown: gRNA target site sequence
tccactgctcaggcggaggt

SEQ ID NO: 8016 - DNA, 20 bp, Unknown
  Description of Unknown: gRNA target site sequence
actgctcaggcggaggtgag

SEQ ID NO: 8017 - DNA, 20 bp, Unknown
  Description of Unknown: gRNA target site sequence
gctcaggcggaggtgagcgg

SEQ ID NO: 8018 - DNA, 20 bp, Unknown
  Description of Unknown: gRNA target site sequence
ctcaggcggaggtgagcgga

SEQ ID NO: 8019 - DNA, 20 bp, Unknown
  Description of Unknown: gRNA target site sequence
tcaggcggaggtgagcggaa

SEQ ID NO: 8020 - DNA, 20 bp, Unknown
  Description of Unknown: gRNA target site sequence
gagcggaagggaaactgtcc

SEQ ID NO: 8021 - DNA, 20 bp, Unknown
  Description of Unknown: gRNA target site sequence
agcggaagggaaactgtccc

SEQ ID NO: 8022 - DNA, 20 bp, Unknown
  Description of Unknown: gRNA target site sequence
gaagggaaactgtcccaggt

SEQ ID NO: 8023 - DNA, 20 bp, Unknown
  Description of Unknown: gRNA target site sequence
aagggaaactgtcccaggtc

SEQ ID NO: 8024 - DNA, 20 bp, Unknown
  Description of Unknown: gRNA target site sequence
aactgtcccaggtcaggttg

SEQ ID NO: 8025 - DNA, 20 bp, Unknown
  Description of Unknown: gRNA target site sequence
actgtcccaggtcaggttga

SEQ ID NO: 8026 - DNA, 20 bp, Unknown
  Description of Unknown: gRNA target site sequence
ctgtcccaggtcaggttgaa

SEQ ID NO: 8027 - DNA, 20 bp, Unknown
  Description of Unknown: gRNA target site sequence
gtcccaggtcaggttgaagg

SEQ ID NO: 8028 - DNA, 20 bp, Unknown
  Description of Unknown: gRNA target site sequence
tcccaggtcaggttgaaggg

SEQ ID NO: 8029 - DNA, 20 bp, Unknown
  Description of Unknown: gRNA target site sequence
cccaggtcaggttgaaggga

SEQ ID NO: 8030 - DNA, 20 bp, Unknown
  Description of Unknown: gRNA target site sequence
cctcttcctccacatccacg

SEQ ID NO: 8031 - DNA, 20 bp, Unknown
  Description of Unknown: gRNA target site sequence
ctcttcctccacatccacgt

SEQ ID NO: 8032 - DNA, 20 bp, Unknown
  Description of Unknown: gRNA target site sequence
tcctccacatccacgtgggc

SEQ ID NO: 8033 - DNA, 20 bp, Unknown
  Description of Unknown: gRNA target site sequence
ctccacatccacgtgggcga

SEQ ID NO: 8034 - DNA, 20 bp, Unknown
  Description of Unknown: gRNA target site sequence
atccacgtgggcgagagtga

SEQ ID NO: 8035 - DNA, 20 bp, Unknown
  Description of Unknown: gRNA target site sequence
ccacgtgggcgagagtgaca

SEQ ID NO: 8036 - DNA, 20 bp, Unknown
  Description of Unknown: gRNA target site sequence
cacgtgggcgagagtgacag

SEQ ID NO: 8037 - DNA, 20 bp, Unknown
  Description of Unknown: gRNA target site sequence
gtgggcgagagtgacagagg

SEQ ID NO: 8038 - DNA, 20 bp, Unknown
  Description of Unknown: gRNA target site sequence
gagagtgacagaggcagtgc

SEQ ID NO: 8039 - DNA, 20 bp, Unknown
  Description of Unknown: gRNA target site sequence
agagtgacagaggcagtgct

SEQ ID NO: 8040 - DNA, 20 bp, Unknown
  Description of Unknown: gRNA target site sequence
gagtgacagaggcagtgctg

SEQ ID NO: 8041 - DNA, 20 bp, Unknown
  Description of Unknown: gRNA target site sequence
agtgacagaggcagtgctgg

SEQ ID NO: 8042 - DNA, 20 bp, Unknown
  Description of Unknown: gRNA target site sequence
tgacagaggcagtgctgggg

SEQ ID NO: 8043 - DNA, 20 bp, Unknown
  Description of Unknown: gRNA target site sequence
gacagaggcagtgctggggg

SEQ ID NO: 8044 - DNA, 20 bp, Unknown
  Description of Unknown: gRNA target site sequence
cagaggcagtgctgggggag

SEQ ID NO: 8045 - DNA, 20 bp, Unknown
  Description of Unknown: gRNA target site sequence
agaggcagtgctgggggagg

SEQ ID NO: 8046 - DNA, 20 bp, Unknown
  Description of Unknown: gRNA target site sequence
gaggcagtgctgggggagga

SEQ ID NO: 8047 - DNA, 20 bp, Unknown
  Description of Unknown: gRNA target site sequence
aggcagtgctgggggaggag

SEQ ID NO: 8048 - DNA, 20 bp, Unknown
  Description of Unknown: gRNA target site sequence
agtgctgggggaggaggggt

SEQ ID NO: 8049 - DNA, 20 bp, Unknown
  Description of Unknown: gRNA target site sequence
gtgctgggggaggaggggtg

SEQ ID NO: 8050 - DNA, 20 bp, Unknown
  Description of Unknown: gRNA target site sequence
gctgggggaggaggggtgag

SEQ ID NO: 8051 - DNA, 20 bp, Unknown
  Description of Unknown: gRNA target site sequence
ctgggggaggaggggtgagg

SEQ ID NO: 8052 - DNA, 20 bp, Unknown
  Description of Unknown: gRNA target site sequence
tgggggaggaggggtgagga

SEQ ID NO: 8053 - DNA, 20 bp, Unknown
  Description of Unknown: gRNA target site sequence
gggggaggaggggtgaggag

SEQ ID NO: 8054 - DNA, 20 bp, Unknown
  Description of Unknown: gRNA target site sequence
ggggaggaggggtgaggagg

SEQ ID NO: 8055 - DNA, 20 bp, Unknown
  Description of Unknown: gRNA target site sequence
gaggaggggtgaggaggggg

SEQ ID NO: 8056 - DNA, 20 bp, Unknown
  Description of Unknown: gRNA target site sequence
aggaggggtgaggagggggt

SEQ ID NO: 8057 - DNA, 20 bp, Unknown
  Description of Unknown: gRNA target site sequence
gggtgaggagggggtaggac

SEQ ID NO: 8058 - DNA, 20 bp, Unknown
  Description of Unknown: gRNA target site sequence
ggtgaggagggggtaggact

SEQ ID NO: 8059 - DNA, 20 bp, Unknown
  Description of Unknown: gRNA target site sequence
gtgaggagggggtaggactg

SEQ ID NO: 8060 - DNA, 20 bp, Unknown
  Description of Unknown: gRNA target site sequence
gaggagggggtaggactggg

SEQ ID NO: 8061 - DNA, 20 bp, Unknown
  Description of Unknown: gRNA target site sequence
ggagggggtaggactgggga

SEQ ID NO: 8062 - DNA, 20 bp, Unknown
  Description of Unknown: gRNA target site sequence
gagggggtaggactggggag

SEQ ID NO: 8063 - DNA, 20 bp, Unknown
  Description of Unknown: gRNA target site sequence
agggggtaggactggggaga

SEQ ID NO: 8064 - DNA, 20 bp, Unknown
  Description of Unknown: gRNA target site sequence
gggtaggactggggagaggg

SEQ ID NO: 8065 - DNA, 20 bp, Unknown
  Description of Unknown: gRNA target site sequence
ggtaggactggggagagggt

SEQ ID NO: 8066 - DNA, 20 bp, Unknown
  Description of Unknown: gRNA target site sequence
gtaggactggggagagggtg

SEQ ID NO: 8067 - DNA, 20 bp, Unknown
  Description of Unknown: gRNA target site sequence
taggactggggagagggtgg

SEQ ID NO: 8068 - DNA, 20 bp, Unknown
  Description of Unknown: gRNA target site sequence
ggactggggagagggtgggg

SEQ ID NO: 8069 - DNA, 20 bp, Unknown
  Description of Unknown: gRNA target site sequence
gactggggagagggtggggg

SEQ ID NO: 8070 - DNA, 20 bp, Unknown
  Description of Unknown: gRNA target site sequence
actggggagagggtggggga

SEQ ID NO: 8071 - DNA, 20 bp, Unknown
  Description of Unknown: gRNA target site sequence
tggggagagggtgggggagg

SEQ ID NO: 8072 - DNA, 20 bp, Unknown
  Description of Unknown: gRNA target site sequence
gggagagggtgggggaggga

SEQ ID NO: 8073 - DNA, 20 bp, Unknown
  Description of Unknown: gRNA target site sequence
gagagggtgggggagggaga

SEQ ID NO: 8074 - DNA, 20 bp, Unknown
  Description of Unknown: gRNA target site sequence
gagggtgggggagggagaga

SEQ ID NO: 8075 - DNA, 20 bp, Unknown
  Description of Unknown: gRNA target site sequence
gtgggggagggagagagaga

SEQ ID NO: 8076 - DNA, 20 bp, Unknown
  Description of Unknown: gRNA target site sequence
gggggagggagagagagaca

SEQ ID NO: 8077 - DNA, 20 bp, Unknown
  Description of Unknown: gRNA target site sequence
gagggagagagagacagaga

SEQ ID NO: 8078 - DNA, 20 bp, Unknown
  Description of Unknown: gRNA target site sequence
agggagagagagacagagac

SEQ ID NO: 8079 - DNA, 20 bp, Unknown
  Description of Unknown: gRNA target site sequence
gggagagagagacagagaca

SEQ ID NO: 8080 - DNA, 20 bp, Unknown
  Description of Unknown: gRNA target site sequence
gagagagagacagagacagg

SEQ ID NO: 8081 - DNA, 20 bp, Unknown
  Description of Unknown: gRNA target site sequence
gagagacagagacagggaga

SEQ ID NO: 8082 - DNA, 20 bp, Unknown
  Description of Unknown: gRNA target site sequence
gagacagagacagggagaca

SEQ ID NO: 8083 - DNA, 20 bp, Unknown
  Description of Unknown: gRNA target site sequence
agacagagacagggagacag

SEQ ID NO: 8084 - DNA, 20 bp, Unknown
  Description of Unknown: gRNA target site sequence
acagagacagggagacagag

SEQ ID NO: 8085 - DNA, 20 bp, Unknown
  Description of Unknown: gRNA target site sequence
agacagggagacagaggaga

SEQ ID NO: 8086 - DNA, 20 bp, Unknown
  Description of Unknown: gRNA target site sequence
gacagggagacagaggagat

SEQ ID NO: 8087 - DNA, 20 bp, Unknown
  Description of Unknown: gRNA target site sequence
acagggagacagaggagatg

SEQ ID NO: 8088 - DNA, 20 bp, Unknown
  Description of Unknown: gRNA target site sequence
agggagacagaggagatggg

SEQ ID NO: 8089 - DNA, 20 bp, Unknown
  Description of Unknown: gRNA target site sequence
gggagacagaggagatgggg

SEQ ID NO: 8090 - DNA, 20 bp, Unknown
  Description of Unknown: gRNA target site sequence
gagacagaggagatggggag

SEQ ID NO: 8091 - DNA, 20 bp, Unknown
  Description of Unknown: gRNA target site sequence
agacagaggagatggggagg

SEQ ID NO: 8092 - DNA, 20 bp, Unknown
  Description of Unknown: gRNA target site sequence
cagaggagatggggaggagg

SEQ ID NO: 8093 - DNA, 20 bp, Unknown
  Description of Unknown: gRNA target site sequence
agaggagatggggaggaggt

SEQ ID NO: 8094 - DNA, 20 bp, Unknown
  Description of Unknown: gRNA target site sequence
atggggaggaggtgggcccg

SEQ ID NO: 8095 - DNA, 20 bp, Unknown
  Description of Unknown: gRNA target site sequence
ggcccccacgccctaccccg

SEQ ID NO: 8096 - DNA, 20 bp, Unknown
  Description of Unknown: gRNA target site sequence
gcccccacgccctaccccgt

SEQ ID NO: 8097 - DNA, 20 bp, Unknown
  Description of Unknown: gRNA target site sequence
cccccacgccctaccccgtg

SEQ ID NO: 8098 - DNA, 20 bp, Unknown
  Description of Unknown: gRNA target site sequence
ccccacgccctaccccgtgg

SEQ ID NO: 8099 - DNA, 20 bp, Unknown
  Description of Unknown: gRNA target site sequence
ctaccccgtgggggtctccc

SEQ ID NO: 8100 - DNA, 20 bp, Unknown
  Description of Unknown: gRNA target site sequence
ccgtgggggtctccccagct

SEQ ID NO: 8101 - DNA, 20 bp, Unknown
  Description of Unknown: gRNA target site sequence
cgtgggggtctccccagctc

SEQ ID NO: 8102 - DNA, 20 bp, Unknown
  Description of Unknown: gRNA target site sequence
gtgggggtctccccagctca

SEQ ID NO: 8103 - DNA, 20 bp, Unknown
  Description of Unknown: gRNA target site sequence
tgtgtctctgctcactgctg

SEQ ID NO: 8104 - DNA, 20 bp, Unknown
  Description of Unknown: gRNA target site sequence
cctctttccatatcccgccc

SEQ ID NO: 8105 - DNA, 20 bp, Unknown
  Description of Unknown: gRNA target site sequence
ccgcccgagctgcccctcct

SEQ ID NO: 8106 - DNA, 20 bp, Unknown
  Description of Unknown: gRNA target site sequence
cgcccgagctgcccctcctg

SEQ ID NO: 8107 - DNA, 20 bp, Unknown
  Description of Unknown: gRNA target site sequence
gctgcccctcctgaggctgc

SEQ ID NO: 8108 - DNA, 20 bp, Unknown
  Description of Unknown: gRNA target site sequence
ctgcccctcctgaggctgcc

SEQ ID NO: 8109 - DNA, 20 bp, Unknown
  Description of Unknown: gRNA target site sequence
cccctcctgaggctgccggg

SEQ ID NO: 8110 - DNA, 20 bp, Unknown
  Description of Unknown: gRNA target site sequence
ccctcctgaggctgccgggt

SEQ ID NO: 8111 - DNA, 20 bp, Unknown
  Description of Unknown: gRNA target site sequence
cctcctgaggctgccgggtg

SEQ ID NO: 8112 - DNA, 20 bp, Unknown
  Description of Unknown: gRNA target site sequence
ctcctgaggctgccgggtgg

SEQ ID NO: 8113 - DNA, 20 bp, Unknown
  Description of Unknown: gRNA target site sequence
ctgaggctgccgggtggggg

SEQ ID NO: 8114 - DNA, 20 bp, Unknown
  Description of Unknown: gRNA target site sequence
tgaggctgccgggtgggggc

SEQ ID NO: 8115 - DNA, 20 bp, Unknown
  Description of Unknown: gRNA target site sequence
ccccatcccccccatctccc

SEQ ID NO: 8116 - DNA, 20 bp, Unknown
  Description of Unknown: gRNA target site sequence
cccatcccccccatctccct

SEQ ID NO: 8117 - DNA, 20 bp, Unknown
  Description of Unknown: gRNA target site sequence
ccatcccccccatctccctg

SEQ ID NO: 8118 - DNA, 20 bp, Unknown
  Description of Unknown: gRNA target site sequence
catcccccccatctccctgg

SEQ ID NO: 8119 - DNA, 20 bp, Unknown
  Description of Unknown: gRNA target site sequence
ccccccatctccctgggggc

SEQ ID NO: 8120 - DNA, 20 bp, Unknown
  Description of Unknown: gRNA target site sequence
cccccatctccctgggggcc

SEQ ID NO: 8121 - DNA, 20 bp, Unknown
  Description of Unknown: gRNA target site sequence
gggggccgggcctccctgcc

SEQ ID NO: 8122 - DNA, 20 bp, Unknown
  Description of Unknown: gRNA target site sequence
ggggccgggcctccctgcct

SEQ ID NO: 8123 - DNA, 20 bp, Unknown
  Description of Unknown: gRNA target site sequence
gggccgggcctccctgcctg

SEQ ID NO: 8124 - DNA, 20 bp, Unknown
  Description of Unknown: gRNA target site sequence
ccgggcctccctgcctgggg

SEQ ID NO: 8125 - DNA, 20 bp, Unknown
  Description of Unknown: gRNA target site sequence
cgggcctccctgcctgggga

SEQ ID NO: 8126 - DNA, 20 bp, Unknown
  Description of Unknown: gRNA target site sequence
gcctccctgcctggggaagg

SEQ ID NO: 8127 - DNA, 20 bp, Unknown
  Description of Unknown: gRNA target site sequence
cctccctgcctggggaaggt

SEQ ID NO: 8128 - DNA, 20 bp, Unknown
  Description of Unknown: gRNA target site sequence
ccctgcctggggaaggtggg

SEQ ID NO: 8129 - DNA, 26 bp, Unknown
  Description of Unknown: gRNA target site sequence
atgaccgaatggcgaacgcagtgaat

SEQ ID NO: 8130 - DNA, 26 bp, Unknown
  Description of Unknown: gRNA target site sequence
ttacctcgtgcggcccgggagcagat

SEQ ID NO: 8131 - DNA, 26 bp, Unknown
  Description of Unknown: gRNA target site sequence
ggatacccgcatggcaacgtgggggt

SEQ ID NO: 8132 - DNA, 26 bp, Unknown
  Description of Unknown: gRNA target site sequence
tctcggatccacgtaggatcgtgggt

SEQ ID NO: 8133 - DNA, 26 bp, Unknown
  Description of Unknown: gRNA target site sequence
cgtaggatgtccctctcccgagtggt

SEQ ID NO: 8134 - DNA, 26 bp, Unknown
  Description of Unknown: gRNA target site sequence
ggatccacgtaggatcgtgggttgat

SEQ ID NO: 8135 - DNA, 26 bp, Unknown
  Description of Unknown: gRNA target site sequence
ccgaatggcgaacgcagtgaatagat

SEQ ID NO: 8136 - DNA, 26 bp, Unknown
  Description of Unknown: gRNA target site sequence
agagggacatcctacggtcccaaggt

SEQ ID NO: 8137 - DNA, 26 bp, Unknown
  Description of Unknown: gRNA target site sequence
gtacaggcgttcccccggggcctagt

SEQ ID NO: 8138 - DNA, 26 bp, Unknown
  Description of Unknown: gRNA target site sequence
tgtggaagtcacgcccgttgggcagt

SEQ ID NO: 8139 - DNA, 26 bp, Unknown
  Description of Unknown: gRNA target site sequence
tgctccctctcggatccacgtaggat

SEQ ID NO: 8140 - DNA, 26 bp, Unknown
  Description of Unknown: gRNA target site sequence
gaaggcggccagcttgtccgtctggt

SEQ ID NO: 8141 - DNA, 26 bp, Unknown
  Description of Unknown: gRNA target site sequence
tcatctgctcccgggccgcacgaggt

SEQ ID NO: 8142 - DNA, 26 bp, Unknown
  Description of Unknown: gRNA target site sequence
ggcccacgcgtgtgcccgcctgcggt

SEQ ID NO: 8143 - DNA, 26 bp, Unknown
  Description of Unknown: gRNA target site sequence
atcggagagcttcgtgctaaactggt

SEQ ID NO: 8144 - DNA, 26 bp, Unknown
  Description of Unknown: gRNA target site sequence
cgcgacccccacgttgccatgcgggt

SEQ ID NO: 8145 - DNA, 26 bp, Unknown
  Description of Unknown: gRNA target site sequence
cgttgcatggcatctcgggcctggat

SEQ ID NO: 8146 - DNA, 26 bp, Unknown
  Description of Unknown: gRNA target site sequence
taaccttggctttacgacgtcaaagt

SEQ ID NO: 8147 - DNA, 26 bp, Unknown
  Description of Unknown: gRNA target site sequence
ctggccggccggcagacaagggcggt

SEQ ID NO: 8148 - DNA, 26 bp, Unknown
  Description of Unknown: gRNA target site sequence
gggggctagacctcggtgtctgcagt

SEQ ID NO: 8149 - DNA, 26 bp, Unknown
  Description of Unknown: gRNA target site sequence
tcatcaacccacgatcctacgtggat

SEQ ID NO: 8150 - DNA, 26 bp, Unknown
  Description of Unknown: gRNA target site sequence
gcgtgtgcggcgtgggcccggggaat

SEQ ID NO: 8151 - DNA, 26 bp, Unknown
  Description of Unknown: gRNA target site sequence
ttcaccggagggctctacatgtgagt

SEQ ID NO: 8152 - DNA, 26 bp, Unknown
  Description of Unknown: gRNA target site sequence
tgctcctgccctcggacggggccaat

SEQ ID NO: 8153 - DNA, 26 bp, Unknown
  Description of Unknown: gRNA target site sequence
gaccgtaggatgtccctctcccgagt

SEQ ID NO: 8154 - DNA, 26 bp, Unknown
  Description of Unknown: gRNA target site sequence
acatgtagagccctccggtgaaaaat

SEQ ID NO: 8155 - DNA, 26 bp, Unknown
  Description of Unknown: gRNA target site sequence
tgtgcccacctgcgagggcgtggggt

SEQ ID NO: 8156 - DNA, 26 bp, Unknown
  Description of Unknown: gRNA target site sequence
tctattcactgcgttcgccattcggt

SEQ ID NO: 8157 - DNA, 26 bp, Unknown
  Description of Unknown: gRNA target site sequence
tccctaatgggaccacggtcagagat

SEQ ID NO: 8158 - DNA, 26 bp, Unknown
  Description of Unknown: gRNA target site sequence
cgtgggacggtttccttgtccctaat

SEQ ID NO: 8159 - DNA, 26 bp, Unknown
  Description of Unknown: gRNA target site sequence
ccgtgtctgtccacatccgagtcaat

SEQ ID NO: 8160 - DNA, 26 bp, Unknown
  Description of Unknown: gRNA target site sequence
gccgaccctgagccgtgctcctaggt

SEQ ID NO: 8161 - DNA, 26 bp, Unknown
  Description of Unknown: gRNA target site sequence
gggggtgaaggctcttagtaggaaat

SEQ ID NO: 8162 - DNA, 26 bp, Unknown
  Description of Unknown: gRNA target site sequence
gaaatgcgctgacccgggctcatggt

SEQ ID NO: 8163 - DNA, 26 bp, Unknown
  Description of Unknown: gRNA target site sequence
gacaggcggcctccgtggcaggcggt

SEQ ID NO: 8164 - DNA, 26 bp, Unknown
  Description of Unknown: gRNA target site sequence
tccctctctcctcgatccgggagagt

SEQ ID NO: 8165 - DNA, 26 bp, Unknown
  Description of Unknown: gRNA target site sequence
ccatgacaaagctccgccgaccgagt

SEQ ID NO: 8166 - DNA, 26 bp, Unknown
  Description of Unknown: gRNA target site sequence
tcagggacttagcctggcggggagat

SEQ ID NO: 8167 - DNA, 26 bp, Unknown
  Description of Unknown: gRNA target site sequence
acgtgcaggatggagctccgcagggt

SEQ ID NO: 8168 - DNA, 26 bp, Unknown
  Description of Unknown: gRNA target site sequence
gtggggggcccaggttcggtgccggt

SEQ ID NO: 8169 - DNA, 26 bp, Unknown
  Description of Unknown: gRNA target site sequence
tggctttacgacgtcaaagtttagat

SEQ ID NO: 8170 - DNA, 26 bp, Unknown
  Description of Unknown: gRNA target site sequence
ctgtacagagtcacccgtgcagagat

SEQ ID NO: 8171 - DNA, 26 bp, Unknown
  Description of Unknown: gRNA target site sequence
agtgtacctgttcgagtgaggacagt

SEQ ID NO: 8172 - DNA, 26 bp, Unknown
  Description of Unknown: gRNA target site sequence
agcccaggggtcccggagcgaggggt

SEQ ID NO: 8173 - DNA, 26 bp, Unknown
  Description of Unknown: gRNA target site sequence
ccacgcagactccccacggccaaggt

SEQ ID NO: 8174 - DNA, 26 bp, Unknown
  Description of Unknown: gRNA target site sequence
tgacccacgggccaaccttaagaggt

SEQ ID NO: 8175 - DNA, 26 bp, Unknown
  Description of Unknown: gRNA target site sequence
gcgccctggccagtcgtctgggcggt

SEQ ID NO: 8176 - DNA, 26 bp, Unknown
  Description of Unknown: gRNA target site sequence
ccctcctgaccttgggaccgtaggat

SEQ ID NO: 8177 - DNA, 26 bp, Unknown
  Description of Unknown: gRNA target site sequence
gggaatgaccgaatggcgaacgcagt

SEQ ID NO: 8178 - DNA, 26 bp, Unknown
  Description of Unknown: gRNA target site sequence
cggacggggccaataagcagccgggt

SEQ ID NO: 8179 - DNA, 26 bp, Unknown
  Description of Unknown: gRNA target site sequence
gccgggcacccccggagaccgcaggt

SEQ ID NO: 8180 - DNA, 26 bp, Unknown
  Description of Unknown: gRNA target site sequence
cagctgagcccctgcgggcgggggat

SEQ ID NO: 8181 - DNA, 26 bp, Unknown
  Description of Unknown: gRNA target site sequence
gatgtggccaccccggccgcagtggt

SEQ ID NO: 8182 - DNA, 26 bp, Unknown
  Description of Unknown: gRNA target site sequence
ttgtgccggacaagactctcacaggt

SEQ ID NO: 8183 - DNA, 26 bp, Unknown
  Description of Unknown: gRNA target site sequence
gccctgcgtccagggcgtttcgggat

SEQ ID NO: 8184 - DNA, 26 bp, Unknown
  Description of Unknown: gRNA target site sequence
aggccaaggcctcccccacggatggt

SEQ ID NO: 8185 - DNA, 26 bp, Unknown
  Description of Unknown: gRNA target site sequence
ccccggggcaggagcctcgagggggt

SEQ ID NO: 8186 - DNA, 26 bp, Unknown
  Description of Unknown: gRNA target site sequence
ggccaataagcagccgggttggggat

SEQ ID NO: 8187 - DNA, 26 bp, Unknown
  Description of Unknown: gRNA target site sequence
aatgtgagtcctgcaggccgtgtggt

SEQ ID NO: 8188 - DNA, 26 bp, Unknown
  Description of Unknown: gRNA target site sequence
gactccccacggccaaggtttggggt

SEQ ID NO: 8189 - DNA, 26 bp, Unknown
  Description of Unknown: gRNA target site sequence
tctcagtccctggcaggtcggggggt

SEQ ID NO: 8190 - DNA, 26 bp, Unknown
  Description of Unknown: gRNA target site sequence
gaagaactgtcctcactcgaacaggt

SEQ ID NO: 8191 - DNA, 26 bp, Unknown
  Description of Unknown: gRNA target site sequence
gctacaactgggctggcggccaggat

SEQ ID NO: 8192 - DNA, 26 bp, Unknown
  Description of Unknown: gRNA target site sequence
accagtttagcacgaagctctccgat

SEQ ID NO: 8193 - DNA, 26 bp, Unknown
  Description of Unknown: gRNA target site sequence
cttcactgtggcaggcgactgggggt

SEQ ID NO: 8194 - DNA, 26 bp, Unknown
  Description of Unknown: gRNA target site sequence
gggcagcaatgcccataccacgtggt

SEQ ID NO: 8195 - DNA, 26 bp, Unknown
  Description of Unknown: gRNA target site sequence
tcacccccttccccgttgaggccagt

SEQ ID NO: 8196 - DNA, 26 bp, Unknown
  Description of Unknown: gRNA target site sequence
ggggtgagctgagccggtcctggggt

SEQ ID NO: 8197 - DNA, 26 bp, Unknown
  Description of Unknown: gRNA target site sequence
gctttgggcagctcgaactcctgggt

SEQ ID NO: 8198 - DNA, 26 bp, Unknown
  Description of Unknown: gRNA target site sequence
tctccccgccaggctaagtccctgat

SEQ ID NO: 8199 - DNA, 26 bp, Unknown
  Description of Unknown: gRNA target site sequence
gggaacccccagtcgcctgccacagt

SEQ ID NO: 8200 - DNA, 26 bp, Unknown
  Description of Unknown: gRNA target site sequence
aaactttgacgtcgtaaagccaaggt

SEQ ID NO: 8201 - DNA, 26 bp, Unknown
  Description of Unknown: gRNA target site sequence
tgggtggggattgtgcccgcctgggt

SEQ ID NO: 8202 - DNA, 26 bp, Unknown
  Description of Unknown: gRNA target site sequence
tctttcccgcctgggtcggggagggt

SEQ ID NO: 8203 - DNA, 26 bp, Unknown
  Description of Unknown: gRNA target site sequence
ggagcacggctcagggtcggcctggt

SEQ ID NO: 8204 - DNA, 26 bp, Unknown
  Description of Unknown: gRNA target site sequence
cctcagtccctggcaggtcggggggt

SEQ ID NO: 8205 - DNA, 26 bp, Unknown
  Description of Unknown: gRNA target site sequence
ccccacctaggagcacggctcagggt

SEQ ID NO: 8206 - DNA, 26 bp, Unknown
  Description of Unknown: gRNA target site sequence
cggggtcttctctcgccactggaaat

SEQ ID NO: 8207 - DNA, 26 bp, Unknown
  Description of Unknown: gRNA target site sequence
ccagatgtggccaccccggccgcagt

SEQ ID NO: 8208 - DNA, 26 bp, Unknown
  Description of Unknown: gRNA target site sequence
tccagagcccttgctgcccgagggat

SEQ ID NO: 8209 - DNA, 26 bp, Unknown
  Description of Unknown: gRNA target site sequence
aggagtggataggccacggcgggggt

SEQ ID NO: 8210 - DNA, 26 bp, Unknown
  Description of Unknown: gRNA target site sequence
taggtaggtggggtcggcggtcaggt

SEQ ID NO: 8211 - DNA, 26 bp, Unknown
  Description of Unknown: gRNA target site sequence
ccacggtcagagatgccgggtctggt

SEQ ID NO: 8212 - DNA, 26 bp, Unknown
  Description of Unknown: gRNA target site sequence
gtgcccattccgctaggaaagacaat

SEQ ID NO: 8213 - DNA, 26 bp, Unknown
  Description of Unknown: gRNA target site sequence
agacgagatgggccattgactcggat

SEQ ID NO: 8214 - DNA, 26 bp, Unknown
  Description of Unknown: gRNA target site sequence
ggggctcagctgacggccctcggagt

SEQ ID NO: 8215 - DNA, 26 bp, Unknown
  Description of Unknown: gRNA target site sequence
tttggaatccaccccggggagcaggt

SEQ ID NO: 8216 - DNA, 26 bp, Unknown
  Description of Unknown: gRNA target site sequence
tggctggtagtgtctactaggaaggt

SEQ ID NO: 8217 - DNA, 26 bp, Unknown
  Description of Unknown: gRNA target site sequence
gaggcaccaacacaggcgcttaagat

SEQ ID NO: 8218 - DNA, 26 bp, Unknown
  Description of Unknown: gRNA target site sequence
tgtgcccgcctgcggtctctgggggt

SEQ ID NO: 8219 - DNA, 26 bp, Unknown
  Description of Unknown: gRNA target site sequence
gttgctggggctcatgcggtaccagt

SEQ ID NO: 8220 - DNA, 26 bp, Unknown
  Description of Unknown: gRNA target site sequence
ttcccccgcagtcgtctccctgggat

SEQ ID NO: 8221 - DNA, 26 bp, Unknown
  Description of Unknown: gRNA target site sequence
cgacgtcaaagtttagatgagctggt

SEQ ID NO: 8222 - DNA, 26 bp, Unknown
  Description of Unknown: gRNA target site sequence
ccctccccgacccaggcgggaaagat

SEQ ID NO: 8223 - DNA, 26 bp, Unknown
  Description of Unknown: gRNA target site sequence
ttgagcctgtcagcgccagcacagat

SEQ ID NO: 8224 - DNA, 26 bp, Unknown
  Description of Unknown: gRNA target site sequence
cactcgggagagggacatcctacggt

SEQ ID NO: 8225 - DNA, 26 bp, Unknown
  Description of Unknown: gRNA target site sequence
agttttcacagatgacccgatttaat

SEQ ID NO: 8226 - DNA, 26 bp, Unknown
  Description of Unknown: gRNA target site sequence
gcggccaggatggttcttaggtaggt

SEQ ID NO: 8227 - DNA, 26 bp, Unknown
  Description of Unknown: gRNA target site sequence
cgcagcctgacactcgtgcctcaggt

SEQ ID NO: 8228 - DNA, 26 bp, Unknown
  Description of Unknown: gRNA target site sequence
cttgctcttatctttcccgcctgggt

SEQ ID NO: 8229 - DNA, 26 bp, Unknown
  Description of Unknown: gRNA target site sequence
ccacctcttaaggttggcccgtgggt

SEQ ID NO: 8230 - DNA, 26 bp, Unknown
  Description of Unknown: gRNA target site sequence
ccgactgagggctggacgtgcaggat

SEQ ID NO: 8231 - DNA, 26 bp, Unknown
  Description of Unknown: gRNA target site sequence
ccagctgccgtcaccctattcctaat

SEQ ID NO: 8232 - DNA, 26 bp, Unknown
  Description of Unknown: gRNA target site sequence
ggaatgaagaccactgcggccggggt

SEQ ID NO: 8233 - DNA, 26 bp, Unknown
  Description of Unknown: gRNA target site sequence
tgcggccggggtggccacatctgggt

SEQ ID NO: 8234 - DNA, 26 bp, Unknown
  Description of Unknown: gRNA target site sequence
gagatgccggtcaccattccccaggt

SEQ ID NO: 8235 - DNA, 26 bp, Unknown
  Description of Unknown: gRNA target site sequence
gtgattttcccggctcacccacaggt

SEQ ID NO: 8236 - DNA, 26 bp, Unknown
  Description of Unknown: gRNA target site sequence
acgactggccagggcgcctgtgggat

SEQ ID NO: 8237 - DNA, 26 bp, Unknown
  Description of Unknown: gRNA target site sequence
acacagggcacggggggctccggggt

SEQ ID NO: 8238 - DNA, 26 bp, Unknown
  Description of Unknown: gRNA target site sequence
gccggccagttccaaaccctggtggt

SEQ ID NO: 8239 - DNA, 26 bp, Unknown
  Description of Unknown: gRNA target site sequence
tgggagcccggccaacccctttaaat

SEQ ID NO: 8240 - DNA, 26 bp, Unknown
  Description of Unknown: gRNA target site sequence
accctcccaggggacgagtgaggggt

SEQ ID NO: 8241 - DNA, 26 bp, Unknown
  Description of Unknown: gRNA target site sequence
agaaccatcctggccgccagcccagt

SEQ ID NO: 8242 - DNA, 26 bp, Unknown
  Description of Unknown: gRNA target site sequence
ttcacccaggccaagcctaagacagt

SEQ ID NO: 8243 - DNA, 26 bp, Unknown
  Description of Unknown: gRNA target site sequence
ctcactcgaacaggtacactttggat

SEQ ID NO: 8244 - DNA, 26 bp, Unknown
  Description of Unknown: gRNA target site sequence
gggacctgtgggtgagccgggaaaat

SEQ ID NO: 8245 - DNA, 26 bp, Unknown
  Description of Unknown: gRNA target site sequence
gtcatgcccactgcgccttgctgagt

SEQ ID NO: 8246 - DNA, 26 bp, Unknown
  Description of Unknown: gRNA target site sequence
aggcccgagatgccatgcaacggggt

SEQ ID NO: 8247 - DNA, 26 bp, Unknown
  Description of Unknown: gRNA target site sequence
caaggcgcagtgggcatgactggggt

SEQ ID NO: 8248 - DNA, 26 bp, Unknown
  Description of Unknown: gRNA target site sequence
gggcgtgacttccacatgagcgtggt

SEQ ID NO: 8249 - DNA, 26 bp, Unknown
  Description of Unknown: gRNA target site sequence
gagcccggccaacccctttaaataat

SEQ ID NO: 8250 - DNA, 26 bp, Unknown
  Description of Unknown: gRNA target site sequence
tcctggcaaggctgcgtcctgaggat

SEQ ID NO: 8251 - DNA, 26 bp, Unknown
  Description of Unknown: gRNA target site sequence
gggtgaggcaggccctgcgtgggggt

SEQ ID NO: 8252 - DNA, 26 bp, Unknown
  Description of Unknown: gRNA target site sequence
tatgtgcctgcctgcggtctccaggt

SEQ ID NO: 8253 - DNA, 26 bp, Unknown
  Description of Unknown: gRNA target site sequence
gactctcacaggtggcatgcctcggt

SEQ ID NO: 8254 - DNA, 26 bp, Unknown
  Description of Unknown: gRNA target site sequence
gcctaccagtccctccgggcaggggt

SEQ ID NO: 8255 - DNA, 26 bp, Unknown
  Description of Unknown: gRNA target site sequence
ccccgtccgagggcaggagcataaat

SEQ ID NO: 8256 - DNA, 26 bp, Unknown
  Description of Unknown: gRNA target site sequence
gggactgtcttaggcttggcctgggt

SEQ ID NO: 8257 - DNA, 26 bp, Unknown
  Description of Unknown: gRNA target site sequence
cccgagatgccatgcaacggggtgat

SEQ ID NO: 8258 - DNA, 26 bp, Unknown
  Description of Unknown: gRNA target site sequence
catcccagcacagcccgtgggacggt

SEQ ID NO: 8259 - DNA, 26 bp, Unknown
  Description of Unknown: gRNA target site sequence
gcccccacgccctaccccgtgggggt

SEQ ID NO: 8260 - DNA, 26 bp, Unknown
  Description of Unknown: gRNA target site sequence
gggtccctgctcacagtacccgtgat

SEQ ID NO: 8261 - DNA, 26 bp, Unknown
  Description of Unknown: gRNA target site sequence
ccagacccggcatctctgaccgtggt

SEQ ID NO: 8262 - DNA, 26 bp, Unknown
  Description of Unknown: gRNA target site sequence
gcagggaccctgcatggctaggaagt

SEQ ID NO: 8263 - DNA, 26 bp, Unknown
  Description of Unknown: gRNA target site sequence
aaccccaaaccttggccgtggggagt

SEQ ID NO: 8264 - DNA, 26 bp, Unknown
  Description of Unknown: gRNA target site sequence
ggccgcagtggtcttcattccaggat

SEQ ID NO: 8265 - DNA, 26 bp, Unknown
  Description of Unknown: gRNA target site sequence
gtctggagggaccttccaccctcagt

SEQ ID NO: 8266 - DNA, 26 bp, Unknown
  Description of Unknown: gRNA target site sequence
gctggcggccaggatggttcttaggt

SEQ ID NO: 8267 - DNA, 26 bp, Unknown
  Description of Unknown: gRNA target site sequence
tcagggtcggcctggtgaccccaagt

SEQ ID NO: 8268 - DNA, 26 bp, Unknown
  Description of Unknown: gRNA target site sequence
aaccgaggcatgccacctgtgagagt

SEQ ID NO: 8269 - DNA, 26 bp, Unknown
  Description of Unknown: gRNA target site sequence
taccagtccctccgggcaggggtggt

SEQ ID NO: 8270 - DNA, 26 bp, Unknown
  Description of Unknown: gRNA target site sequence
ccagccgcccagtccccaaagcaaat

SEQ ID NO: 8271 - DNA, 26 bp, Unknown
  Description of Unknown: gRNA target site sequence
tttggaactggccggctggcctgggt

SEQ ID NO: 8272 - DNA, 26 bp, Unknown
  Description of Unknown: gRNA target site sequence
cggcctccgtggcaggcggtggtgat

SEQ ID NO: 8273 - DNA, 26 bp, Unknown
  Description of Unknown: gRNA target site sequence
ctgagccgtgctcctaggtggggggt

SEQ ID NO: 8274 - DNA, 26 bp, Unknown
  Description of Unknown: gRNA target site sequence
tgagcgtggtcagggcccggcgcaat

SEQ ID NO: 8275 - DNA, 26 bp, Unknown
  Description of Unknown: gRNA target site sequence
aaccgtcccacgggctgtgctgggat

SEQ ID NO: 8276 - DNA, 26 bp, Unknown
  Description of Unknown: gRNA target site sequence
cccaagcccaggccttttaggggggt

SEQ ID NO: 8277 - DNA, 26 bp, Unknown
  Description of Unknown: gRNA target site sequence
cctggatcttaagcgcctgtgttggt

SEQ ID NO: 8278 - DNA, 26 bp, Unknown
  Description of Unknown: gRNA target site sequence
tgcccaggcctgagacggaactgagt

SEQ ID NO: 8279 - DNA, 26 bp, Unknown
  Description of Unknown: gRNA target site sequence
ttgctgcccgagggatgtgagcaggt

SEQ ID NO: 8280 - DNA, 26 bp, Unknown
  Description of Unknown: gRNA target site sequence
ctccttagcatgctctcatatttaat

SEQ ID NO: 8281 - DNA, 26 bp, Unknown
  Description of Unknown: gRNA target site sequence
cccattccgctaggaaagacaatggt

SEQ ID NO: 8282 - DNA, 26 bp, Unknown
  Description of Unknown: gRNA target site sequence
gaactggcctcaacggggaagggggt

SEQ ID NO: 8283 - DNA, 26 bp, Unknown
  Description of Unknown: gRNA target site sequence
ccgcccacgacaccaaccaccagggt

SEQ ID NO: 8284 - DNA, 26 bp, Unknown
  Description of Unknown: gRNA target site sequence
gggaccccccagctgtagggcgaggt

SEQ ID NO: 8285 - DNA, 26 bp, Unknown
  Description of Unknown: gRNA target site sequence
cccactcacatgtagagccctccggt

SEQ ID NO: 8286 - DNA, 26 bp, Unknown
  Description of Unknown: gRNA target site sequence
agctggacctgctccccggggtggat

SEQ ID NO: 8287 - DNA, 26 bp, Unknown
  Description of Unknown: gRNA target site sequence
cggaactgagtgacagtgcactgggt

SEQ ID NO: 8288 - DNA, 26 bp, Unknown
  Description of Unknown: gRNA target site sequence
gtgaggccaaggcctcccccacggat

SEQ ID NO: 8289 - DNA, 26 bp, Unknown
  Description of Unknown: gRNA target site sequence
cagttgtgtgacacggaagcggcagt

SEQ ID NO: 8290 - DNA, 26 bp, Unknown
  Description of Unknown: gRNA target site sequence
tgtcatggcagctccagccgcccagt

SEQ ID NO: 8291 - DNA, 26 bp, Unknown
  Description of Unknown: gRNA target site sequence
acccctcactcgtcccctgggagggt

SEQ ID NO: 8292 - DNA, 26 bp, Unknown
  Description of Unknown: gRNA target site sequence
cggggtggattccaaaataggggggt

SEQ ID NO: 8293 - DNA, 26 bp, Unknown
  Description of Unknown: gRNA target site sequence
ctcaggaggggcagctcgggcgggat

SEQ ID NO: 8294 - DNA, 26 bp, Unknown
  Description of Unknown: gRNA target site sequence
aggtggggtcctggctataatagaat

SEQ ID NO: 8295 - DNA, 26 bp, Unknown
  Description of Unknown: gRNA target site sequence
atttttcaaaatagtccgtttaaaat

SEQ ID NO: 8296 - DNA, 26 bp, Unknown
  Description of Unknown: gRNA target site sequence
caggatggttcttaggtaggtggggt

SEQ ID NO: 8297 - DNA, 26 bp, Unknown
  Description of Unknown: gRNA target site sequence
ccatgacccaaagcacacggagaagt

SEQ ID NO: 8298 - DNA, 26 bp, Unknown
  Description of Unknown: gRNA target site sequence
tgacggcagctgggactaggtaagat

SEQ ID NO: 8299 - DNA, 26 bp, Unknown
  Description of Unknown: gRNA target site sequence
ctctggcacaggggagtgtaactggt

SEQ ID NO: 8300 - DNA, 26 bp, Unknown
  Description of Unknown: gRNA target site sequence
tcatgtgaccaggaccaactcctagt

SEQ ID NO: 8301 - DNA, 26 bp, Unknown
  Description of Unknown: gRNA target site sequence
ccagccggccagttccaaaccctggt

SEQ ID NO: 8302 - DNA, 26 bp, Unknown
  Description of Unknown: gRNA target site sequence
atctggccctccctgtaggggacggt

SEQ ID NO: 8303 - DNA, 26 bp, Unknown
  Description of Unknown: gRNA target site sequence
agcagtggagaaggcggcactctggt

SEQ ID NO: 8304 - DNA, 26 bp, Unknown
  Description of Unknown: gRNA target site sequence
accgtcccctacagggagggccagat

SEQ ID NO: 8305 - DNA, 26 bp, Unknown
  Description of Unknown: gRNA target site sequence
ggcagcctggtgctgctagtctgggt

SEQ ID NO: 8306 - DNA, 26 bp, Unknown
  Description of Unknown: gRNA target site sequence
agagagggctgtgccctatgcagggt

SEQ ID NO: 8307 - DNA, 26 bp, Unknown
  Description of Unknown: gRNA target site sequence
ggggagtgtaactggtctgggtgggt

SEQ ID NO: 8308 - DNA, 26 bp, Unknown
  Description of Unknown: gRNA target site sequence
gggcattgagacatgagtcctgtggt

SEQ ID NO: 8309 - DNA, 26 bp, Unknown
  Description of Unknown: gRNA target site sequence
acagccctctctcatcaacccacgat

SEQ ID NO: 8310 - DNA, 26 bp, Unknown
  Description of Unknown: gRNA target site sequence
ctcactgtgggcattgagacatgagt

SEQ ID NO: 8311 - DNA, 26 bp, Unknown
  Description of Unknown: gRNA target site sequence
ccttctctctggaagggcacaaaggt

SEQ ID NO: 8312 - DNA, 26 bp, Unknown
  Description of Unknown: gRNA target site sequence
gttcttaggtaggtggggtcggcggt

SEQ ID NO: 8313 - DNA, 26 bp, Unknown
  Description of Unknown: gRNA target site sequence
tcctcccagtggtgtcacaccccggt

SEQ ID NO: 8314 - DNA, 26 bp, Unknown
  Description of Unknown: gRNA target site sequence
agtggtggccccgggaatgaccgaat

SEQ ID NO: 8315 - DNA, 26 bp, Unknown
  Description of Unknown: gRNA target site sequence
tctggaagggcacaaaggtcaggggt

SEQ ID NO: 8316 - DNA, 26 bp, Unknown
  Description of Unknown: gRNA target site sequence
aacttgatccaggaccagccagtggt

SEQ ID NO: 8317 - DNA, 26 bp, Unknown
  Description of Unknown: gRNA target site sequence
tctaacttgatccaggaccagccagt

SEQ ID NO: 8318 - DNA, 26 bp, Unknown
  Description of Unknown: gRNA target site sequence
agctcagcccctggacggcctgcaat

SEQ ID NO: 8319 - DNA, 26 bp, Unknown
  Description of Unknown: gRNA target site sequence
cagatcccacaggcgccctggccagt

SEQ ID NO: 8320 - DNA, 26 bp, Unknown
  Description of Unknown: gRNA target site sequence
aaccctgtggcatgggacctgtgggt

SEQ ID NO: 8321 - DNA, 26 bp, Unknown
  Description of Unknown: gRNA target site sequence
tgcctgctggccgcctggatgctggt

SEQ ID NO: 8322 - DNA, 26 bp, Unknown
  Description of Unknown: gRNA target site sequence
ggagcagccaaggtgcccctggcagt

SEQ ID NO: 8323 - DNA, 26 bp, Unknown
  Description of Unknown: gRNA target site sequence
ggttggcactaggagttggtcctggt

SEQ ID NO: 8324 - DNA, 26 bp, Unknown
  Description of Unknown: gRNA target site sequence
gccagttccaaaccctggtggttggt

SEQ ID NO: 8325 - DNA, 26 bp, Unknown
  Description of Unknown: gRNA target site sequence
tttgacgtcgtaaagccaaggttagt

SEQ ID NO: 8326 - DNA, 26 bp, Unknown
  Description of Unknown: gRNA target site sequence
aggcgcttaagatccaggcccgagat

SEQ ID NO: 8327 - DNA, 26 bp, Unknown
  Description of Unknown: gRNA target site sequence
ttccttgtccctaatgggaccacggt

SEQ ID NO: 8328 - DNA, 26 bp, Unknown
  Description of Unknown: gRNA target site sequence
tgacgagcgcccctctgccctctggt

SEQ ID NO: 8329 - DNA, 26 bp, Unknown
  Description of Unknown: gRNA target site sequence
agtcaggagcaggtccctccaccaat

SEQ ID NO: 8330 - DNA, 26 bp, Unknown
  Description of Unknown: gRNA target site sequence
acaactgggctggcggccaggatggt

SEQ ID NO: 8331 - DNA, 26 bp, Unknown
  Description of Unknown: gRNA target site sequence
ctggctggtcctggatcaagttagat

SEQ ID NO: 8332 - DNA, 26 bp, Unknown
  Description of Unknown: gRNA target site sequence
gccaggcgcaccggccagcccctggt

SEQ ID NO: 8333 - DNA, 26 bp, Unknown
  Description of Unknown: gRNA target site sequence
tgggtcaggacccacaggaccccagt

SEQ ID NO: 8334 - DNA, 26 bp, Unknown
  Description of Unknown: gRNA target site sequence
cggcgtgctggctggacaccagaggt

SEQ ID NO: 8335 - DNA, 26 bp, Unknown
  Description of Unknown: gRNA target site sequence
ccctccaccaatgtgtgcaaataaat

SEQ ID NO: 8336 - DNA, 26 bp, Unknown
  Description of Unknown: gRNA target site sequence
gtggaggccagtgcccatccccgggt

SEQ ID NO: 8337 - DNA, 26 bp, Unknown
  Description of Unknown: gRNA target site sequence
cccccgacctgccagggactgagagt

SEQ ID NO: 8338 - DNA, 26 bp, Unknown
  Description of Unknown: gRNA target site sequence
cccccgacctgccagggactgagggt

SEQ ID NO: 8339 - DNA, 26 bp, Unknown
  Description of Unknown: gRNA target site sequence
cacccacaggtcccatgccacagggt

SEQ ID NO: 8340 - DNA, 26 bp, Unknown
  Description of Unknown: gRNA target site sequence
agcttcctggtggtgttcccagaggt

SEQ ID NO: 8341 - DNA, 26 bp, Unknown
  Description of Unknown: gRNA target site sequence
ctctgggccctgctgggtaccggggt

SEQ ID NO: 8342 - DNA, 26 bp, Unknown
  Description of Unknown: gRNA target site sequence
taccacccctgcccggagggactggt

SEQ ID NO: 8343 - DNA, 26 bp, Unknown
  Description of Unknown: gRNA target site sequence
cagcgctgactggagctcacagtggt

SEQ ID NO: 8344 - DNA, 26 bp, Unknown
  Description of Unknown: gRNA target site sequence
gtcaggggttaggacggggtcagggt

SEQ ID NO: 8345 - DNA, 26 bp, Unknown
  Description of Unknown: gRNA target site sequence
gtctggagggacctttcactctcagt

SEQ ID NO: 8346 - DNA, 26 bp, Unknown
  Description of Unknown: gRNA target site sequence
ctcaggtgcctgctggccgcctggat

SEQ ID NO: 8347 - DNA, 26 bp, Unknown
  Description of Unknown: gRNA target site sequence
gtttccccaggtgctccctctcggat

SEQ ID NO: 8348 - DNA, 26 bp, Unknown
  Description of Unknown: gRNA target site sequence
cagggagcagataactcctggggagt

SEQ ID NO: 8349 - DNA, 26 bp, Unknown
  Description of Unknown: gRNA target site sequence
gggtggggtgggggctagacctcggt

SEQ ID NO: 8350 - DNA, 26 bp, Unknown
  Description of Unknown: gRNA target site sequence
gcgggagtgagggccgccagcagggt

SEQ ID NO: 8351 - DNA, 26 bp, Unknown
  Description of Unknown: gRNA target site sequence
gggcacaatccccacccaggagggat

SEQ ID NO: 8352 - DNA, 26 bp, Unknown
  Description of Unknown: gRNA target site sequence
gacccaaagcacacggagaagtcagt

SEQ ID NO: 8353 - DNA, 26 bp, Unknown
  Description of Unknown: gRNA target site sequence
aggtccttgtcttgggagcccagggt

SEQ ID NO: 8354 - DNA, 26 bp, Unknown
  Description of Unknown: gRNA target site sequence
gaagtgaccactggctggtcctggat

SEQ ID NO: 8355 - DNA, 26 bp, Unknown
  Description of Unknown: gRNA target site sequence
caggaaggcacggccctgacaaggat

SEQ ID NO: 8356 - DNA, 26 bp, Unknown
  Description of Unknown: gRNA target site sequence
ggtgggtgtcccctcctgcacaggat

SEQ ID NO: 8357 - DNA, 26 bp, Unknown
  Description of Unknown: gRNA target site sequence
gccagccccacactgtcagacccagt

SEQ ID NO: 8358 - DNA, 26 bp, Unknown
  Description of Unknown: gRNA target site sequence
gacaagggatcccccttccctgtggt

SEQ ID NO: 8359 - DNA, 26 bp, Unknown
  Description of Unknown: gRNA target site sequence
tgcttccagagctagaggacagagat

SEQ ID NO: 8360 - DNA, 26 bp, Unknown
  Description of Unknown: gRNA target site sequence
cacaggggagtgtaactggtctgggt

SEQ ID NO: 8361 - DNA, 26 bp, Unknown
  Description of Unknown: gRNA target site sequence
ggtgctgcctgggcatgtgtaaaggt

SEQ ID NO: 8362 - DNA, 26 bp, Unknown
  Description of Unknown: gRNA target site sequence
cagtgaggttggcactaggagttggt

SEQ ID NO: 8363 - DNA, 26 bp, Unknown
  Description of Unknown: gRNA target site sequence
tcctccacatccacgtgggcgagagt

SEQ ID NO: 8364 - DNA, 26 bp, Unknown
  Description of Unknown: gRNA target site sequence
cagatcatggctttagggattgaggt

SEQ ID NO: 8365 - DNA, 26 bp, Unknown
  Description of Unknown: gRNA target site sequence
ggccctgaccacgctcatgtggaagt

SEQ ID NO: 8366 - DNA, 26 bp, Unknown
  Description of Unknown: gRNA target site sequence
ggagccgcgggcctccttcctgcggt

SEQ ID NO: 8367 - DNA, 26 bp, Unknown
  Description of Unknown: gRNA target site sequence
gtcctggatcaagttagatttggggt

SEQ ID NO: 8368 - DNA, 26 bp, Unknown
  Description of Unknown: gRNA target site sequence
cagagggccagccgggcacagagggt

SEQ ID NO: 8369 - DNA, 26 bp, Unknown
  Description of Unknown: gRNA target site sequence
ccagctacacaaggggctgctgaggt

SEQ ID NO: 8370 - DNA, 26 bp, Unknown
  Description of Unknown: gRNA target site sequence
tgggcagagacccaggcgggcacaat

SEQ ID NO: 8371 - DNA, 26 bp, Unknown
  Description of Unknown: gRNA target site sequence
tccagttacaagaacaatgcacagat

SEQ ID NO: 8372 - DNA, 26 bp, Unknown
  Description of Unknown: gRNA target site sequence
aggaccggctgagaggggacagaggt

SEQ ID NO: 8373 - DNA, 26 bp, Unknown
  Description of Unknown: gRNA target site sequence
gtgtggccccttggcaggctcagggt

SEQ ID NO: 8374 - DNA, 26 bp, Unknown
  Description of Unknown: gRNA target site sequence
cagggcccaagactgggcacaggagt

SEQ ID NO: 8375 - DNA, 26 bp, Unknown
  Description of Unknown: gRNA target site sequence
gcagaccctccaccatgagcccgggt

SEQ ID NO: 8376 - DNA, 26 bp, Unknown
  Description of Unknown: gRNA target site sequence
atgaatatccctcacctagaatcaat

SEQ ID NO: 8377 - DNA, 26 bp, Unknown
  Description of Unknown: gRNA target site sequence
caagcgcgggcacctgaggcacgagt

SEQ ID NO: 8378 - DNA, 26 bp, Unknown
  Description of Unknown: gRNA target site sequence
tccttggtcaaaatccactctggagt

SEQ ID NO: 8379 - DNA, 26 bp, Unknown
  Description of Unknown: gRNA target site sequence
gaggctcctgccccgggggtcctggt

SEQ ID NO: 8380 - DNA, 26 bp, Unknown
  Description of Unknown: gRNA target site sequence
ttcctaataaggccgccttctgaggt

SEQ ID NO: 8381 - DNA, 26 bp, Unknown
  Description of Unknown: gRNA target site sequence
gagcccctgcgggcgggggatgaggt

SEQ ID NO: 8382 - DNA, 26 bp, Unknown
  Description of Unknown: gRNA target site sequence
tggggcccagagaggaacccaggagt

SEQ ID NO: 8383 - DNA, 26 bp, Unknown
  Description of Unknown: gRNA target site sequence
agagaacacaggcacggctgaggggt

SEQ ID NO: 8384 - DNA, 26 bp, Unknown
  Description of Unknown: gRNA target site sequence
agagacctgcctgaatggaggaagat

SEQ ID NO: 8385 - DNA, 26 bp, Unknown
  Description of Unknown: gRNA target site sequence
tgggaccacggtcagagatgccgggt

SEQ ID NO: 8386 - DNA, 26 bp, Unknown
  Description of Unknown: gRNA target site sequence
ttgtccctagaggacctggcaggggt

SEQ ID NO: 8387 - DNA, 26 bp, Unknown
  Description of Unknown: gRNA target site sequence
agcagctcatagtggggggcccaggt

SEQ ID NO: 8388 - DNA, 26 bp, Unknown
  Description of Unknown: gRNA target site sequence
acatgacagacccacccacctctggt

SEQ ID NO: 8389 - DNA, 26 bp, Unknown
  Description of Unknown: gRNA target site sequence
tggtagtgtctactaggaaggtgaat

SEQ ID NO: 8390 - DNA, 26 bp, Unknown
  Description of Unknown: gRNA target site sequence
gaagtgaccttgaggccacccagggt

SEQ ID NO: 8391 - DNA, 26 bp, Unknown
  Description of Unknown: gRNA target site sequence
ggctgggctgggtagttttcacagat

SEQ ID NO: 8392 - DNA, 26 bp, Unknown
  Description of Unknown: gRNA target site sequence
cctctgtcactctcgcccacgtggat

SEQ ID NO: 8393 - DNA, 26 bp, Unknown
  Description of Unknown: gRNA target site sequence
gtccaggagcgggctgtggtcacagt

SEQ ID NO: 8394 - DNA, 26 bp, Unknown
  Description of Unknown: gRNA target site sequence
gcccccgtgtccccatgcctaccagt

SEQ ID NO: 8395 - DNA, 26 bp, Unknown
  Description of Unknown: gRNA target site sequence
acagctcagggtaagcagctcatagt

SEQ ID NO: 8396 - DNA, 26 bp, Unknown
  Description of Unknown: gRNA target site sequence
cctgtcagcgccagcacagatcaagt

SEQ ID NO: 8397 - DNA, 26 bp, Unknown
  Description of Unknown: gRNA target site sequence
ggggtcctgtgggtcctgacccagat

SEQ ID NO: 8398 - DNA, 26 bp, Unknown
  Description of Unknown: gRNA target site sequence
gcagctgtcgggacagacaggcaggt

SEQ ID NO: 8399 - DNA, 26 bp, Unknown
  Description of Unknown: gRNA target site sequence
catgcaggaccgaggggccacagggt

SEQ ID NO: 8400 - DNA, 26 bp, Unknown
  Description of Unknown: gRNA target site sequence
acagagggaacagggacaccctgggt

SEQ ID NO: 8401 - DNA, 26 bp, Unknown
  Description of Unknown: gRNA target site sequence
ggcccacatatgtgcctgcctgcggt

SEQ ID NO: 8402 - DNA, 26 bp, Unknown
  Description of Unknown: gRNA target site sequence
gggagccgaccctgtggcccctcggt

SEQ ID NO: 8403 - DNA, 26 bp, Unknown
  Description of Unknown: gRNA target site sequence
gcctgggcacggccccccagcgaggt

SEQ ID NO: 8404 - DNA, 26 bp, Unknown
  Description of Unknown: gRNA target site sequence
ctggctctgacttgggtctccctgat

SEQ ID NO: 8405 - DNA, 26 bp, Unknown
  Description of Unknown: gRNA target site sequence
caggcatccttggtcctcactcgagt

SEQ ID NO: 8406 - DNA, 26 bp, Unknown
  Description of Unknown: gRNA target site sequence
gactggctcccacccagtgtgggggt

SEQ ID NO: 8407 - DNA, 26 bp, Unknown
  Description of Unknown: gRNA target site sequence
gccctgacaaggatgctgcctcaggt

SEQ ID NO: 8408 - DNA, 26 bp, Unknown
  Description of Unknown: gRNA target site sequence
tggtggagggtctgcagaacactggt

SEQ ID NO: 8409 - DNA, 26 bp, Unknown
  Description of Unknown: gRNA target site sequence
tagtccccactgtcttgctggaaaat

SEQ ID NO: 8410 - DNA, 26 bp, Unknown
  Description of Unknown: gRNA target site sequence
gcccagctggacctgctccccggggt

SEQ ID NO: 8411 - DNA, 26 bp, Unknown
  Description of Unknown: gRNA target site sequence
gtgggcatgactggggtcctgtgggt

SEQ ID NO: 8412 - DNA, 26 bp, Unknown
  Description of Unknown: gRNA target site sequence
tatatccaaagtgtacctgttcgagt

SEQ ID NO: 8413 - DNA, 26 bp, Unknown
  Description of Unknown: gRNA target site sequence
caagctcggagctgggaccacgtggt

SEQ ID NO: 8414 - DNA, 26 bp, Unknown
  Description of Unknown: gRNA target site sequence
agcacctcgccctacagctggggggt

SEQ ID NO: 8415 - DNA, 26 bp, Unknown
  Description of Unknown: gRNA target site sequence
gctgacccgggctcatggtggagggt

SEQ ID NO: 8416 - DNA, 26 bp, Unknown
  Description of Unknown: gRNA target site sequence
actcgtcccctgggagggtgcccagt

SEQ ID NO: 8417 - DNA, 26 bp, Unknown
  Description of Unknown: gRNA target site sequence
agggacaccctgggtggcctcaaggt

SEQ ID NO: 8418 - DNA, 26 bp, Unknown
  Description of Unknown: gRNA target site sequence
gggtgggcacatggggggccctaggt

SEQ ID NO: 8419 - DNA, 26 bp, Unknown
  Description of Unknown: gRNA target site sequence
ggcctcggaggccccggggcaggggt

SEQ ID NO: 8420 - DNA, 26 bp, Unknown
  Description of Unknown: gRNA target site sequence
ctctccttggaacccattcctgaaat

SEQ ID NO: 8421 - DNA, 26 bp, Unknown
  Description of Unknown: gRNA target site sequence
aagctctcctgtctccaatgtaagat

SEQ ID NO: 8422 - DNA, 26 bp, Unknown
  Description of Unknown: gRNA target site sequence
ctctgccttgcccaggcatccttggt

SEQ ID NO: 8423 - DNA, 26 bp, Unknown
  Description of Unknown: gRNA target site sequence
ctgcgtgtttctgtagaatgacgggt

SEQ ID NO: 8424 - DNA, 26 bp, Unknown
  Description of Unknown: gRNA target site sequence
ccagcccacctgcggtctccgggggt

SEQ ID NO: 8425 - DNA, 26 bp, Unknown
  Description of Unknown: gRNA target site sequence
cagagggtccaggagcgggctgtggt

SEQ ID NO: 8426 - DNA, 26 bp, Unknown
  Description of Unknown: gRNA target site sequence
ggtcctggctataatagaatgtgagt

SEQ ID NO: 8427 - DNA, 26 bp, Unknown
  Description of Unknown: gRNA target site sequence
acacaagggaagcacacacctgaggt

SEQ ID NO: 8428 - DNA, 26 bp, Unknown
  Description of Unknown: gRNA target site sequence
aggacctctgtcccctctcagccggt

SEQ ID NO: 8429 - DNA, 26 bp, Unknown
  Description of Unknown: gRNA target site sequence
ggccccgtgtctgtccacatccgagt

SEQ ID NO: 8430 - DNA, 26 bp, Unknown
  Description of Unknown: gRNA target site sequence
ggggaatcttccagccactccagagt

SEQ ID NO: 8431 - DNA, 26 bp, Unknown
  Description of Unknown: gRNA target site sequence
agtgacagtgcactgggtctgacagt

SEQ ID NO: 8432 - DNA, 26 bp, Unknown
  Description of Unknown: gRNA target site sequence
cctgccagggactgagagtgaaaggt

SEQ ID NO: 8433 - DNA, 26 bp, Unknown
  Description of Unknown: gRNA target site sequence
caggagtgggggtgcagtgtgtggat

SEQ ID NO: 8434 - DNA, 26 bp, Unknown
  Description of Unknown: gRNA target site sequence
tcgaacaggtacactttggatataat

SEQ ID NO: 8435 - DNA, 26 bp, Unknown
  Description of Unknown: gRNA target site sequence
gcccttccagagagaagggcagaagt

SEQ ID NO: 8436 - DNA, 26 bp, Unknown
  Description of Unknown: gRNA target site sequence
tggccgctgtgtgtccacaccgcaat

SEQ ID NO: 8437 - DNA, 26 bp, Unknown
  Description of Unknown: gRNA target site sequence
tgagcggaagggaaactgtcccaggt

SEQ ID NO: 8438 - DNA, 26 bp, Unknown
  Description of Unknown: gRNA target site sequence
aggggccgaggtggggaacccccagt

SEQ ID NO: 8439 - DNA, 26 bp, Unknown
  Description of Unknown: gRNA target site sequence
ctggccaggcatgggtgtccctgagt

SEQ ID NO: 8440 - DNA, 26 bp, Unknown
  Description of Unknown: gRNA target site sequence
tctgtgctggcaggacctgaagcagt

SEQ ID NO: 8441 - DNA, 26 bp, Unknown
  Description of Unknown: gRNA target site sequence
tctggaagggccaccccagctggaat

SEQ ID NO: 8442 - DNA, 26 bp, Unknown
  Description of Unknown: gRNA target site sequence
cacccccacactgggtgggagccagt

SEQ ID NO: 8443 - DNA, 26 bp, Unknown
  Description of Unknown: gRNA target site sequence
tagggtgacggcagctgggactaggt

SEQ ID NO: 8444 - DNA, 26 bp, Unknown
  Description of Unknown: gRNA target site sequence
tcagacccagtgcactgtcactcagt

SEQ ID NO: 8445 - DNA, 26 bp, Unknown
  Description of Unknown: gRNA target site sequence
ttctgtctccaggatccctcctgggt

SEQ ID NO: 8446 - DNA, 26 bp, Unknown
  Description of Unknown: gRNA target site sequence
gggcgaggtgctggcgacaggacaat

SEQ ID NO: 8447 - DNA, 26 bp, Unknown
  Description of Unknown: gRNA target site sequence
cctgaacttgggggctggttggagat

SEQ ID NO: 8448 - DNA, 26 bp, Unknown
  Description of Unknown: gRNA target site sequence
gttacactcccctgtgccagagcagt

SEQ ID NO: 8449 - DNA, 26 bp, Unknown
  Description of Unknown: gRNA target site sequence
ccactggaaatccagctccccatagt

SEQ ID NO: 8450 - DNA, 26 bp, Unknown
  Description of Unknown: gRNA target site sequence
tccaggcggccagcaggcacctgagt

SEQ ID NO: 8451 - DNA, 26 bp, Unknown
  Description of Unknown: gRNA target site sequence
cccccccaacccccctattttggaat

SEQ ID NO: 8452 - DNA, 26 bp, Unknown
  Description of Unknown: gRNA target site sequence
agctctgcccgcaggctctctttgat

SEQ ID NO: 8453 - DNA, 26 bp, Unknown
  Description of Unknown: gRNA target site sequence
ggactatggggagctggatttccagt

SEQ ID NO: 8454 - DNA, 26 bp, Unknown
  Description of Unknown: gRNA target site sequence
cccctacagggagggccagatgcagt

SEQ ID NO: 8455 - DNA, 26 bp, Unknown
  Description of Unknown: gRNA target site sequence
agtgaggtcttccaactcctcacagt

SEQ ID NO: 8456 - DNA, 26 bp, Unknown
  Description of Unknown: gRNA target site sequence
tcctctgagctggttgctccttgagt

SEQ ID NO: 8457 - DNA, 26 bp, Unknown
  Description of Unknown: gRNA target site sequence
aggactcatgtctcaatgcccacagt

SEQ ID NO: 8458 - DNA, 26 bp, Unknown
  Description of Unknown: gRNA target site sequence
aacaatgaatatccctcacctagaat

SEQ ID NO: 8459 - DNA, 26 bp, Unknown
  Description of Unknown: gRNA target site sequence
tcccgagtggtgtgaggggctggggt

SEQ ID NO: 8460 - DNA, 26 bp, Unknown
  Description of Unknown: gRNA target site sequence
ggtggccctgccccaggagtgggggt

SEQ ID NO: 8461 - DNA, 26 bp, Unknown
  Description of Unknown: gRNA target site sequence
gctgcttgaactgcagacaccgaggt

SEQ ID NO: 8462 - DNA, 26 bp, Unknown
  Description of Unknown: gRNA target site sequence
tgcctgcggtggtggggcccctgggt

SEQ ID NO: 8463 - DNA, 26 bp, Unknown
  Description of Unknown: gRNA target site sequence
gtgagactcaccaggggctggccggt

SEQ ID NO: 8464 - DNA, 26 bp, Unknown
  Description of Unknown: gRNA target site sequence
cctgtctccaatgtaagataagaaat

SEQ ID NO: 8465 - DNA, 26 bp, Unknown
  Description of Unknown: gRNA target site sequence
tcctccattcaggcaggtctctgagt

SEQ ID NO: 8466 - DNA, 26 bp, Unknown
  Description of Unknown: gRNA target site sequence
tctggctcaatgtccccctctgaaat

SEQ ID NO: 8467 - DNA, 26 bp, Unknown
  Description of Unknown: gRNA target site sequence
cccagggtcctggcttgaggcccagt

SEQ ID NO: 8468 - DNA, 26 bp, Unknown
  Description of Unknown: gRNA target site sequence
tggaatcccatagaaacaccccaaat

SEQ ID NO: 8469 - DNA, 26 bp, Unknown
  Description of Unknown: gRNA target site sequence
ctgtcgaaggcccagagctcagcagt

SEQ ID NO: 8470 - DNA, 26 bp, Unknown
  Description of Unknown: gRNA target site sequence
cactcgagttttcctaaggatgggat

SEQ ID NO: 8471 - DNA, 26 bp, Unknown
  Description of Unknown: gRNA target site sequence
gggccccagatcatggctttagggat

SEQ ID NO: 8472 - DNA, 26 bp, Unknown
  Description of Unknown: gRNA target site sequence
atctgcgccttgggggccagggagat

SEQ ID NO: 8473 - DNA, 26 bp, Unknown
  Description of Unknown: gRNA target site sequence
cctctgccctctggttcccccgcagt

SEQ ID NO: 8474 - DNA, 26 bp, Unknown
  Description of Unknown: gRNA target site sequence
gcttctggaaagcaatgtcctgtaat

SEQ ID NO: 8475 - DNA, 26 bp, Unknown
  Description of Unknown: gRNA target site sequence
tctgaccggcttccttggccaccagt

SEQ ID NO: 8476 - DNA, 26 bp, Unknown
  Description of Unknown: gRNA target site sequence
gcaaggctgcgtcctgaggattaaat

SEQ ID NO: 8477 - DNA, 26 bp, Unknown
  Description of Unknown: gRNA target site sequence
aatcttccagccactccagagtggat

SEQ ID NO: 8478 - DNA, 26 bp, Unknown
  Description of Unknown: gRNA target site sequence
ctcccttcaacctgacctgggacagt

SEQ ID NO: 8479 - DNA, 26 bp, Unknown
  Description of Unknown: gRNA target site sequence
tactgacttctccgtgtgctttgggt

SEQ ID NO: 8480 - DNA, 26 bp, Unknown
  Description of Unknown: gRNA target site sequence
agcagtgtccatcctcaggcctcagt

SEQ ID NO: 8481 - DNA, 26 bp, Unknown
  Description of Unknown: gRNA target site sequence
gggaagcacacacctgaggtgggagt

SEQ ID NO: 8482 - DNA, 26 bp, Unknown
  Description of Unknown: gRNA target site sequence
ttgtggggcagggaagctgaggcagt

SEQ ID NO: 8483 - DNA, 26 bp, Unknown
  Description of Unknown: gRNA target site sequence
cacacacacacacgactgtgaggagt

SEQ ID NO: 8484 - DNA, 26 bp, Unknown
  Description of Unknown: gRNA target site sequence
tctgctccctgcaggcctagagaagt

SEQ ID NO: 8485 - DNA, 26 bp, Unknown
  Description of Unknown: gRNA target site sequence
caggggacgagtgaggggtttgaagt

SEQ ID NO: 8486 - DNA, 26 bp, Unknown
  Description of Unknown: gRNA target site sequence
tctctgtggactatggggagctggat

SEQ ID NO: 8487 - DNA, 26 bp, Unknown
  Description of Unknown: gRNA target site sequence
ctcctgaaacatatgcctgccagggt

SEQ ID NO: 8488 - DNA, 26 bp, Unknown
  Description of Unknown: gRNA target site sequence
gggatatggaaagaggccacagcagt

SEQ ID NO: 8489 - DNA, 26 bp, Unknown
  Description of Unknown: gRNA target site sequence
ggaccagccagtggtcacttctgaat

SEQ ID NO: 8490 - DNA, 26 bp, Unknown
  Description of Unknown: gRNA target site sequence
ggaaaactcgagtgaggaccaaggat

SEQ ID NO: 8491 - DNA, 26 bp, Unknown
  Description of Unknown: gRNA target site sequence
gcacagggcactcagcaaggcgcagt

SEQ ID NO: 8492 - DNA, 26 bp, Unknown
  Description of Unknown: gRNA target site sequence
gtcccaggtcaggttgaagggagggt

SEQ ID NO: 8493 - DNA, 26 bp, Unknown
  Description of Unknown: gRNA target site sequence
tctgcactgctctggcacaggggagt

SEQ ID NO: 8494 - DNA, 26 bp, Unknown
  Description of Unknown: gRNA target site sequence
cgtctggttgctggggctcatgcggt

SEQ ID NO: 8495 - DNA, 26 bp, Unknown
  Description of Unknown: gRNA target site sequence
tgcccagccagcctgcacctggggat

SEQ ID NO: 8496 - DNA, 26 bp, Unknown
  Description of Unknown: gRNA target site sequence
atgtacctcccactcctgtgcccagt

SEQ ID NO: 8497 - DNA, 26 bp, Unknown
  Description of Unknown: gRNA target site sequence
tgagggcagactagaggggctggggt

SEQ ID NO: 8498 - DNA, 26 bp, Unknown
  Description of Unknown: gRNA target site sequence
gccaccattgtctttcctagcggaat

SEQ ID NO: 8499 - DNA, 26 bp, Unknown
  Description of Unknown: gRNA target site sequence
acaaaggtcaggggttaggacggggt

SEQ ID NO: 8500 - DNA, 26 bp, Unknown
  Description of Unknown: gRNA target site sequence
ctgagctggggagacccccacggggt

SEQ ID NO: 8501 - DNA, 26 bp, Unknown
  Description of Unknown: gRNA target site sequence
cttggggctgcgtgtttctgtagaat

SEQ ID NO: 8502 - DNA, 26 bp, Unknown
  Description of Unknown: gRNA target site sequence
cccctgcctccaccaactggctgggt

SEQ ID NO: 8503 - DNA, 26 bp, Unknown
  Description of Unknown: gRNA target site sequence
ggtgcccctcatcttgtcctcccagt

SEQ ID NO: 8504 - DNA, 26 bp, Unknown
  Description of Unknown: gRNA target site sequence
ggcgcaccggccagcccctggtgagt

SEQ ID NO: 8505 - DNA, 26 bp, Unknown
  Description of Unknown: gRNA target site sequence
cgcagctgtggcaaccagggcctggt

SEQ ID NO: 8506 - DNA, 26 bp, Unknown
  Description of Unknown: gRNA target site sequence
gtctcagagactggctcccacccagt

SEQ ID NO: 8507 - DNA, 26 bp, Unknown
  Description of Unknown: gRNA target site sequence
tgcccagtgaggttggcactaggagt

SEQ ID NO: 8508 - DNA, 26 bp, Unknown
  Description of Unknown: gRNA target site sequence
ctgcacaggatcaggagctccagggt

SEQ ID NO: 8509 - DNA, 26 bp, Unknown
  Description of Unknown: gRNA target site sequence
gatccactgtgccttccttcctgggt

SEQ ID NO: 8510 - DNA, 26 bp, Unknown
  Description of Unknown: gRNA target site sequence
ggcgtgggaccactgtgagctccagt

SEQ ID NO: 8511 - DNA, 26 bp, Unknown
  Description of Unknown: gRNA target site sequence
tccatcctgcacgtccagccctcagt

SEQ ID NO: 8512 - DNA, 26 bp, Unknown
  Description of Unknown: gRNA target site sequence
ggagatggccttggagcagccaaggt

SEQ ID NO: 8513 - DNA, 26 bp, Unknown
  Description of Unknown: gRNA target site sequence
tccgatgtgttggagaagctgcaggt

SEQ ID NO: 8514 - DNA, 26 bp, Unknown
  Description of Unknown: gRNA target site sequence
gcacagcacctggctctgacttgggt

SEQ ID NO: 8515 - DNA, 26 bp, Unknown
  Description of Unknown: gRNA target site sequence
ctgtacaggaagccaggcctgctggt

SEQ ID NO: 8516 - DNA, 26 bp, Unknown
  Description of Unknown: gRNA target site sequence
gcgtgcctgtcccccagcttcctggt

SEQ ID NO: 8517 - DNA, 26 bp, Unknown
  Description of Unknown: gRNA target site sequence
ggccagggagatggccccacagaggt

SEQ ID NO: 8518 - DNA, 26 bp, Unknown
  Description of Unknown: gRNA target site sequence
aggccatctccaaccagcccccaagt

SEQ ID NO: 8519 - DNA, 26 bp, Unknown
  Description of Unknown: gRNA target site sequence
tactaggaaggtgaatattcagaagt

SEQ ID NO: 8520 - DNA, 26 bp, Unknown
  Description of Unknown: gRNA target site sequence
gaggccttggcctcactctcccggat

SEQ ID NO: 8521 - DNA, 26 bp, Unknown
  Description of Unknown: gRNA target site sequence
caagcccaccccacgccctcgcaggt

SEQ ID NO: 8522 - DNA, 26 bp, Unknown
  Description of Unknown: gRNA target site sequence
ttttggaatcctaaatctgcaagaat

SEQ ID NO: 8523 - DNA, 26 bp, Unknown
  Description of Unknown: gRNA target site sequence
tgtgcctgcctgcggtctccaggggt

SEQ ID NO: 8524 - DNA, 26 bp, Unknown
  Description of Unknown: gRNA target site sequence
actgggcaccctcccaggggacgagt

SEQ ID NO: 8525 - DNA, 26 bp, Unknown
  Description of Unknown: gRNA target site sequence
ggaagggaaactgtcccaggtcaggt

SEQ ID NO: 8526 - DNA, 26 bp, Unknown
  Description of Unknown: gRNA target site sequence
caagactgggcacaggagtgggaggt

SEQ ID NO: 8527 - DNA, 26 bp, Unknown
  Description of Unknown: gRNA target site sequence
gttaggacggggtcagggtggagggt

SEQ ID NO: 8528 - DNA, 26 bp, Unknown
  Description of Unknown: gRNA target site sequence
tccctgccccacaaagggcctgaggt

SEQ ID NO: 8529 - DNA, 26 bp, Unknown
  Description of Unknown: gRNA target site sequence
ccccaccacaggactcatgtctcaat

SEQ ID NO: 8530 - DNA, 26 bp, Unknown
  Description of Unknown: gRNA target site sequence
accccacagccctccttggtcaaaat

SEQ ID NO: 8531 - DNA, 26 bp, Unknown
  Description of Unknown: gRNA target site sequence
cctttcactctcagtccctggcaggt

SEQ ID NO: 8532 - DNA, 26 bp, Unknown
  Description of Unknown: gRNA target site sequence
aggaagaggctccctctctcctcgat

SEQ ID NO: 8533 - DNA, 26 bp, Unknown
  Description of Unknown: gRNA target site sequence
tagggcagggaccccccagctccagt

SEQ ID NO: 8534 - DNA, 26 bp, Unknown
  Description of Unknown: gRNA target site sequence
acggagaagtcagtaaggggccaagt

SEQ ID NO: 8535 - DNA, 26 bp, Unknown
  Description of Unknown: gRNA target site sequence
ctgggcatgtgtaaaggtggaggggt

SEQ ID NO: 8536 - DNA, 26 bp, Unknown
  Description of Unknown: gRNA target site sequence
gtgaaggtggcgttgtccccttcggt

SEQ ID NO: 8537 - DNA, 26 bp, Unknown
  Description of Unknown: gRNA target site sequence
gctgctatttatttgcacacattggt

SEQ ID NO: 8538 - DNA, 26 bp, Unknown
  Description of Unknown: gRNA target site sequence
aggtcagaagagctcctggctgtggt

SEQ ID NO: 8539 - DNA, 26 bp, Unknown
  Description of Unknown: gRNA target site sequence
attggagacaggagagcttgaaaagt

SEQ ID NO: 8540 - DNA, 26 bp, Unknown
  Description of Unknown: gRNA target site sequence
tgagctgagccggtcctggggtgggt

SEQ ID NO: 8541 - DNA, 26 bp, Unknown
  Description of Unknown: gRNA target site sequence
ctcacctagaatcaataactaagaat

SEQ ID NO: 8542 - DNA, 26 bp, Unknown
  Description of Unknown: gRNA target site sequence
cttctctaggcctgcagggagcagat

SEQ ID NO: 8543 - DNA, 26 bp, Unknown
  Description of Unknown: gRNA target site sequence
cacagtgtacacagagggcccagggt

SEQ ID NO: 8544 - DNA, 26 bp, Unknown
  Description of Unknown: gRNA target site sequence
gccgggtctggtctgggccagcaggt

SEQ ID NO: 8545 - DNA, 26 bp, Unknown
  Description of Unknown: gRNA target site sequence
gccttccttcctgggtgggcagaggt

SEQ ID NO: 8546 - DNA, 26 bp, Unknown
  Description of Unknown: gRNA target site sequence
cacgggggctatggagcaggcacagt

SEQ ID NO: 8547 - DNA, 26 bp, Unknown
  Description of Unknown: gRNA target site sequence
ttctccgtgtgctttgggtcatgggt

SEQ ID NO: 8548 - DNA, 26 bp, Unknown
  Description of Unknown: gRNA target site sequence
ggcctgagacggaactgagtgacagt

SEQ ID NO: 8549 - DNA, 26 bp, Unknown
  Description of Unknown: gRNA target site sequence
atgcccaagggtcaggggctggggat

SEQ ID NO: 8550 - DNA, 26 bp, Unknown
  Description of Unknown: gRNA target site sequence
gggggtgtcagggcggccccaggggt

SEQ ID NO: 8551 - DNA, 26 bp, Unknown
  Description of Unknown: gRNA target site sequence
cggtcaggtgtcccagagccaggggt

SEQ ID NO: 8552 - DNA, 26 bp, Unknown
  Description of Unknown: gRNA target site sequence
aatccactctggagtggctggaagat

SEQ ID NO: 8553 - DNA, 26 bp, Unknown
  Description of Unknown: gRNA target site sequence
agcaggcctggcttcctgtacagagt

SEQ ID NO: 8554 - DNA, 26 bp, Unknown
  Description of Unknown: gRNA target site sequence
tgggttccaaggagagctcccagggt

SEQ ID NO: 8555 - DNA, 26 bp, Unknown
  Description of Unknown: gRNA target site sequence
agagaggaggggtggtgtccccagat

SEQ ID NO: 8556 - DNA, 26 bp, Unknown
  Description of Unknown: gRNA target site sequence
ccaggcgggaaagataagagcaaggt

SEQ ID NO: 8557 - DNA, 26 bp, Unknown
  Description of Unknown: gRNA target site sequence
ggtgaggaacagaagtcatcacgggt

SEQ ID NO: 8558 - DNA, 26 bp, Unknown
  Description of Unknown: gRNA target site sequence
gaaggcggccttattaggaatagggt

SEQ ID NO: 8559 - DNA, 26 bp, Unknown
  Description of Unknown: gRNA target site sequence
caggcctgtgaggtggcggtgggggt

SEQ ID NO: 8560 - DNA, 26 bp, Unknown
  Description of Unknown: gRNA target site sequence
ccccagccccgtgatgttggaggaat

SEQ ID NO: 8561 - DNA, 26 bp, Unknown
  Description of Unknown: gRNA target site sequence
tccctgcagagaaacacacttggggt

SEQ ID NO: 8562 - DNA, 26 bp, Unknown
  Description of Unknown: gRNA target site sequence
catggggctggggactccccaggagt

SEQ ID NO: 8563 - DNA, 26 bp, Unknown
  Description of Unknown: gRNA target site sequence
tgccctacgaccctggagctcctgat

SEQ ID NO: 8564 - DNA, 26 bp, Unknown
  Description of Unknown: gRNA target site sequence
agaggccccagcagagacttctcaat

SEQ ID NO: 8565 - DNA, 26 bp, Unknown
  Description of Unknown: gRNA target site sequence
gtggtggggctgtgcctggtgcaggt

SEQ ID NO: 8566 - DNA, 26 bp, Unknown
  Description of Unknown: gRNA target site sequence
ggggaaggcctgactcaggccaggat

SEQ ID NO: 8567 - DNA, 26 bp, Unknown
  Description of Unknown: gRNA target site sequence
tttgccttttgcccagaatctccagt

SEQ ID NO: 8568 - DNA, 26 bp, Unknown
  Description of Unknown: gRNA target site sequence
acttttcaagctctcctgtctccaat

SEQ ID NO: 8569 - DNA, 26 bp, Unknown
  Description of Unknown: gRNA target site sequence
tcccctgggagggtgcccagtgaggt

SEQ ID NO: 8570 - DNA, 26 bp, Unknown
  Description of Unknown: gRNA target site sequence
ttagatttggggtgtttctatgggat

SEQ ID NO: 8571 - DNA, 26 bp, Unknown
  Description of Unknown: gRNA target site sequence
acagatggtcccagggacattgcggt

SEQ ID NO: 8572 - DNA, 26 bp, Unknown
  Description of Unknown: gRNA target site sequence
agggcagtggtgggacagctcagggt

SEQ ID NO: 8573 - DNA, 26 bp, Unknown
  Description of Unknown: gRNA target site sequence
ccccagatcacacagagggcagtggt

SEQ ID NO: 8574 - DNA, 26 bp, Unknown
  Description of Unknown: gRNA target site sequence
gggagcacctggggaaacaatggaat

SEQ ID NO: 8575 - DNA, 26 bp, Unknown
  Description of Unknown: gRNA target site sequence
ccacgcagggcctgcctcaccccagt

SEQ ID NO: 8576 - DNA, 26 bp, Unknown
  Description of Unknown: gRNA target site sequence
cagggcactcagagacctgcctgaat

SEQ ID NO: 8577 - DNA, 26 bp, Unknown
  Description of Unknown: gRNA target site sequence
ctaaaaggcctgggcttggggaagat

SEQ ID NO: 8578 - DNA, 26 bp, Unknown
  Description of Unknown: gRNA target site sequence
gtcactcaggactcagaactggagat

SEQ ID NO: 8579 - DNA, 26 bp, Unknown
  Description of Unknown: gRNA target site sequence
gtggagggacctgctcctgacttgat

SEQ ID NO: 8580 - DNA, 26 bp, Unknown
  Description of Unknown: gRNA target site sequence
gtgcccagccactgaggcctgaggat

SEQ ID NO: 8581 - DNA, 26 bp, Unknown
  Description of Unknown: gRNA target site sequence
ggagaccccgaggggctgcctgcggt

SEQ ID NO: 8582 - DNA, 26 bp, Unknown
  Description of Unknown: gRNA target site sequence
cacagtggatcatgcaggaaaagagt

SEQ ID NO: 8583 - DNA, 26 bp, Unknown
  Description of Unknown: gRNA target site sequence
gtgcccgcctgggtctctgcccagat

SEQ ID NO: 8584 - DNA, 26 bp, Unknown
  Description of Unknown: gRNA target site sequence
cagtgcagacaggaccaggccaggat

SEQ ID NO: 8585 - DNA, 26 bp, Unknown
  Description of Unknown: gRNA target site sequence
ccctggcattcttgcagatttaggat

SEQ ID NO: 8586 - DNA, 26 bp, Unknown
  Description of Unknown: gRNA target site sequence
gtcctcactcgagttttcctaaggat

SEQ ID NO: 8587 - DNA, 26 bp, Unknown
  Description of Unknown: gRNA target site sequence
aggcggcctccgtggcaggcggtggt

SEQ ID NO: 8588 - DNA, 26 bp, Unknown
  Description of Unknown: gRNA target site sequence
cgtcaaagtttagatgagctggtgat

SEQ ID NO: 8589 - DNA, 26 bp, Unknown
  Description of Unknown: gRNA target site sequence
ccggcccccagggagatgggggggat

SEQ ID NO: 8590 - DNA, 26 bp, Unknown
  Description of Unknown: gRNA target site sequence
aggtccctccaccaatgtgtgcaaat

SEQ ID NO: 8591 - DNA, 26 bp, Unknown
  Description of Unknown: gRNA target site sequence
cgtgctcctaggtggggggtcttagt

SEQ ID NO: 8592 - DNA, 26 bp, Unknown
  Description of Unknown: gRNA target site sequence
ccccccatctccccgccaggctaagt

SEQ ID NO: 8593 - DNA, 26 bp, Unknown
  Description of Unknown: gRNA target site sequence
gggggggcggaacaggagcccagggt

SEQ ID NO: 8594 - DNA, 26 bp, Unknown
  Description of Unknown: gRNA target site sequence
catgcctggagcagccccaccagagt

SEQ ID NO: 8595 - DNA, 26 bp, Unknown
  Description of Unknown: gRNA target site sequence
ctcccaggagccctcttggccctgat

SEQ ID NO: 8596 - DNA, 26 bp, Unknown
  Description of Unknown: gRNA target site sequence
aaggccgccttctgaggtcatggggt

SEQ ID NO: 8597 - DNA, 26 bp, Unknown
  Description of Unknown: gRNA target site sequence
tggctggacaccagaggtgggtgggt

SEQ ID NO: 8598 - DNA, 26 bp, Unknown
  Description of Unknown: gRNA target site sequence
aagcacacacctgaggtgggagtggt

SEQ ID NO: 8599 - DNA, 26 bp, Unknown
  Description of Unknown: gRNA target site sequence
cccagcccccaggcagcaacctcaat

SEQ ID NO: 8600 - DNA, 26 bp, Unknown
  Description of Unknown: gRNA target site sequence
tcccacccagtgtgggggtgctgggt

SEQ ID NO: 8601 - DNA, 26 bp, Unknown
  Description of Unknown: gRNA target site sequence
attttgaccaaggagggctgtggggt

SEQ ID NO: 8602 - DNA, 26 bp, Unknown
  Description of Unknown: gRNA target site sequence
gcaacctcaatccctaaagccatgat

SEQ ID NO: 8603 - DNA, 26 bp, Unknown
  Description of Unknown: gRNA target site sequence
ttcttgcagatttaggattccaaaat

SEQ ID NO: 8604 - DNA, 26 bp, Unknown
  Description of Unknown: gRNA target site sequence
gcccatcttcctccattcaggcaggt

SEQ ID NO: 8605 - DNA, 26 bp, Unknown
  Description of Unknown: gRNA target site sequence
ggtggggctgctccaggcatgcagat

SEQ ID NO: 8606 - DNA, 26 bp, Unknown
  Description of Unknown: gRNA target site sequence
tcttctgtgcgcttctggaaagcaat

SEQ ID NO: 8607 - DNA, 26 bp, Unknown
  Description of Unknown: gRNA target site sequence
agccatgcagggtccctgctcacagt

SEQ ID NO: 8608 - DNA, 26 bp, Unknown
  Description of Unknown: gRNA target site sequence
cttccgctcacctccgcctgagcagt

SEQ ID NO: 8609 - DNA, 26 bp, Unknown
  Description of Unknown: gRNA target site sequence
tgtccccagatcacacagagggcagt

SEQ ID NO: 8610 - DNA, 26 bp, Unknown
  Description of Unknown: gRNA target site sequence
tgcctgccagggtcagggcttgggat

SEQ ID NO: 8611 - DNA, 26 bp, Unknown
  Description of Unknown: gRNA target site sequence
caggggaaatgccctgccctctgggt

SEQ ID NO: 8612 - DNA, 26 bp, Unknown
  Description of Unknown: gRNA target site sequence
tccgtttaaaatctgacttcaaaagt

SEQ ID NO: 8613 - DNA, 26 bp, Unknown
  Description of Unknown: gRNA target site sequence
acgtgggcgagagtgacagaggcagt

SEQ ID NO: 8614 - DNA, 26 bp, Unknown
  Description of Unknown: gRNA target site sequence
cagcacagatcaagtcaggagcaggt

SEQ ID NO: 8615 - DNA, 26 bp, Unknown
  Description of Unknown: gRNA target site sequence
ccccagctggaatgtcattgagaagt

SEQ ID NO: 8616 - DNA, 26 bp, Unknown
  Description of Unknown: gRNA target site sequence
caggccctggttgccacagctgcggt

SEQ ID NO: 8617 - DNA, 26 bp, Unknown
  Description of Unknown: gRNA target site sequence
cctggcaggcatatgtttcaggaggt

SEQ ID NO: 8618 - DNA, 26 bp, Unknown
  Description of Unknown: gRNA target site sequence
cacgtagaaggaagaggctctgcagt

SEQ ID NO: 8619 - DNA, 26 bp, Unknown
  Description of Unknown: gRNA target site sequence
tggctcccctggatcctggcctgagt

SEQ ID NO: 8620 - DNA, 26 bp, Unknown
  Description of Unknown: gRNA target site sequence
acaccacccctcctctctggctcaat

SEQ ID NO: 8621 - DNA, 26 bp, Unknown
  Description of Unknown: gRNA target site sequence
cggggaagggggtgaaggctcttagt

SEQ ID NO: 8622 - DNA, 26 bp, Unknown
  Description of Unknown: gRNA target site sequence
tggaaagcaatgtcctgtaatgcggt

SEQ ID NO: 8623 - DNA, 26 bp, Unknown
  Description of Unknown: gRNA target site sequence
cagacaggcaggtgaggaacagaagt

SEQ ID NO: 8624 - DNA, 26 bp, Unknown
  Description of Unknown: gRNA target site sequence
gaggtgggagtggtggccccgggaat

SEQ ID NO: 8625 - DNA, 26 bp, Unknown
  Description of Unknown: gRNA target site sequence
gtgtgacaccactgggaggacaagat

SEQ ID NO: 8626 - DNA, 26 bp, Unknown
  Description of Unknown: gRNA target site sequence
ccagtccccaaagcaaatgtgtcaat

SEQ ID NO: 8627 - DNA, 26 bp, Unknown
  Description of Unknown: gRNA target site sequence
gggcctgtctggggagtctgagagat

SEQ ID NO: 8628 - DNA, 26 bp, Unknown
  Description of Unknown: gRNA target site sequence
gctctgtcctgcacctggggaatggt

SEQ ID NO: 8629 - DNA, 26 bp, Unknown
  Description of Unknown: gRNA target site sequence
ggggttccagggcctgtctggggagt

SEQ ID NO: 8630 - DNA, 26 bp, Unknown
  Description of Unknown: gRNA target site sequence
cttctgaacccaggaacacagagggt

SEQ ID NO: 8631 - DNA, 26 bp, Unknown
  Description of Unknown: gRNA target site sequence
gtggaacaggcctgtgaggtggcggt

SEQ ID NO: 8632 - DNA, 26 bp, Unknown
  Description of Unknown: gRNA target site sequence
aggagggaaaagaggcatcctggaat

SEQ ID NO: 8633 - DNA, 26 bp, Unknown
  Description of Unknown: gRNA target site sequence
agcctggcggggagatggggggaggt

SEQ ID NO: 8634 - DNA, 26 bp, Unknown
  Description of Unknown: gRNA target site sequence
agaatctccagttctgagtcctgagt

SEQ ID NO: 8635 - DNA, 26 bp, Unknown
  Description of Unknown: gRNA target site sequence
atattcagaagtgaccactggctggt

SEQ ID NO: 8636 - DNA, 26 bp, Unknown
  Description of Unknown: gRNA target site sequence
ggggctgtggaacaggcctgtgaggt

SEQ ID NO: 8637 - DNA, 26 bp, Unknown
  Description of Unknown: gRNA target site sequence
gaaatgtccctggcattcttgcagat

SEQ ID NO: 8638 - DNA, 26 bp, Unknown
  Description of Unknown: gRNA target site sequence
tggggactagagctcacagcaaagat

SEQ ID NO: 8639 - DNA, 26 bp, Unknown
  Description of Unknown: gRNA target site sequence
atgtgtcaatattcttagttattgat

SEQ ID NO: 8640 - DNA, 26 bp, Unknown
  Description of Unknown: gRNA target site sequence
tgtgcttcccttgtgttttatgagat

SEQ ID NO: 8641 - DNA, 26 bp, Unknown
  Description of Unknown: gRNA target site sequence
acaggcctgttccacagccccgggat

SEQ ID NO: 8642 - DNA, 26 bp, Unknown
  Description of Unknown: gRNA target site sequence
ggaagctgggggacaggcacgcaggt

SEQ ID NO: 8643 - DNA, 26 bp, Unknown
  Description of Unknown: gRNA target site sequence
gaccactggctggtcctggatcaagt

SEQ ID NO: 8644 - DNA, 26 bp, Unknown
  Description of Unknown: gRNA target site sequence
ctgacccttgggcatcctggcctggt

SEQ ID NO: 8645 - DNA, 26 bp, Unknown
  Description of Unknown: gRNA target site sequence
gatgctggtggccctgccccaggagt

SEQ ID NO: 8646 - DNA, 26 bp, Unknown
  Description of Unknown: gRNA target site sequence
gaccccgaggggctgcctgcggtggt

SEQ ID NO: 8647 - DNA, 26 bp, Unknown
  Description of Unknown: gRNA target site sequence
tggactcggcacagagcaggggaaat

SEQ ID NO: 8648 - DNA, 26 bp, Unknown
  Description of Unknown: gRNA target site sequence
ggagggtgctggtggctcccctggat

SEQ ID NO: 8649 - DNA, 26 bp, Unknown
  Description of Unknown: gRNA target site sequence
tgtggccaccctctgtgttcctgggt

SEQ ID NO: 8650 - DNA, 26 bp, Unknown
  Description of Unknown: gRNA target site sequence
tggccacagctgggaggggcctgagt

SEQ ID NO: 8651 - DNA, 26 bp, Unknown
  Description of Unknown: gRNA target site sequence
aggtgacacagagaccaggccctggt

SEQ ID NO: 8652 - DNA, 26 bp, Unknown
  Description of Unknown: gRNA target site sequence
tgcgggcagagctcagggtgacaggt

SEQ ID NO: 8653 - DNA, 26 bp, Unknown
  Description of Unknown: gRNA target site sequence
ttgaccaaggagggctgtggggtagt

SEQ ID NO: 8654 - DNA, 26 bp, Unknown
  Description of Unknown: gRNA target site sequence
ctgctgggcagcctggtgctgctagt

SEQ ID NO: 8655 - DNA, 26 bp, Unknown
  Description of Unknown: gRNA target site sequence
cttctcaatgacattccagctggggt

SEQ ID NO: 8656 - DNA, 26 bp, Unknown
  Description of Unknown: gRNA target site sequence
cctcctgcctgaacttgggggctggt

SEQ ID NO: 8657 - DNA, 26 bp, Unknown
  Description of Unknown: gRNA target site sequence
aaaagtcacattttggaatcctaaat

SEQ ID NO: 8658 - DNA, 26 bp, Unknown
  Description of Unknown: gRNA target site sequence
tgcatggcagccctggcctgggagat

SEQ ID NO: 8659 - DNA, 26 bp, Unknown
  Description of Unknown: gRNA target site sequence
ggcccatgtgtgtgcctgcctgcggt

SEQ ID NO: 8660 - DNA, 26 bp, Unknown
  Description of Unknown: gRNA target site sequence
gaagatggtgtccccagccccgtgat

SEQ ID NO: 8661 - DNA, 26 bp, Unknown
  Description of Unknown: gRNA target site sequence
aggaccaggccaggatgcccaagggt

SEQ ID NO: 8662 - DNA, 26 bp, Unknown
  Description of Unknown: gRNA target site sequence
cagggagacccaagtcagagccaggt

SEQ ID NO: 8663 - DNA, 26 bp, Unknown
  Description of Unknown: gRNA target site sequence
ctccaggatccctcctgggtggggat

SEQ ID NO: 8664 - DNA, 26 bp, Unknown
  Description of Unknown: gRNA target site sequence
ggcctccctgcctggggaaggtgggt

SEQ ID NO: 8665 - DNA, 26 bp, Unknown
  Description of Unknown: gRNA target site sequence
ccacccagccccagcctaggcccagt

SEQ ID NO: 8666 - DNA, 26 bp, Unknown
  Description of Unknown: gRNA target site sequence
ttaaagtcaaacttttgaagtcagat

SEQ ID NO: 8667 - DNA, 26 bp, Unknown
  Description of Unknown: gRNA target site sequence
tggcagcgctgactggagctcacagt

SEQ ID NO: 8668 - DNA, 26 bp, Unknown
  Description of Unknown: gRNA target site sequence
aggcttcctggcctcccttggctggt

SEQ ID NO: 8669 - DNA, 26 bp, Unknown
  Description of Unknown: gRNA target site sequence
tgctaaggagttctgtcctgtctggt

SEQ ID NO: 8670 - DNA, 26 bp, Unknown
  Description of Unknown: gRNA target site sequence
aaataaatagcagctaagtttccagt

SEQ ID NO: 8671 - DNA, 26 bp, Unknown
  Description of Unknown: gRNA target site sequence
gaagcatctttgctgtgagctctagt

SEQ ID NO: 8672 - DNA, 26 bp, Unknown
  Description of Unknown: gRNA target site sequence
gccctctgggtttctgggaatgcagt

SEQ ID NO: 8673 - DNA, 26 bp, Unknown
  Description of Unknown: gRNA target site sequence
aaaggcctgggcttggggaagatggt

SEQ ID NO: 8674 - DNA, 26 bp, Unknown
  Description of Unknown: gRNA target site sequence
cagggaggcccggcccccagggagat

SEQ ID NO: 8675 - DNA, 26 bp, Unknown
  Description of Unknown: gRNA target site sequence
gtgggcggcctgctgggcagcctggt

SEQ ID NO: 8676 - DNA, 26 bp, Unknown
  Description of Unknown: gRNA target site sequence
gaacactggtggccaaggaagccggt

SEQ ID NO: 8677 - DNA, 26 bp, Unknown
  Description of Unknown: gRNA target site sequence
catcccatccttaggaaaactcgagt

SEQ ID NO: 8678 - DNA, 26 bp, Unknown
  Description of Unknown: gRNA target site sequence
ttaaatatgagagcatgctaaggagt

SEQ ID NO: 8679 - DNA, 26 bp, Unknown
  Description of Unknown: gRNA target site sequence
cacttctgaatattcaccttcctagt

SEQ ID NO: 8680 - DNA, 26 bp, Unknown
  Description of Unknown: gRNA target site sequence
aggcctagagaagtttcagggaaggt

SEQ ID NO: 8681 - DNA, 26 bp, Unknown
  Description of Unknown: gRNA target site sequence
agggctctgtcctgcacctggggaat

SEQ ID NO: 8682 - DNA, 26 bp, Unknown
  Description of Unknown: gRNA target site sequence
cccaggcttcctggccaggcatgggt

SEQ ID NO: 8683 - DNA, 26 bp, Unknown
  Description of Unknown: gRNA target site sequence
gcccctcatcttgtcctcccagtggt

SEQ ID NO: 8684 - DNA, 26 bp, Unknown
  Description of Unknown: gRNA target site sequence
gacctcactcctcacccctgccaggt

SEQ ID NO: 8685 - DNA, 26 bp, Unknown
  Description of Unknown: gRNA target site sequence
tgtgtgcaaataaatagcagctaagt

SEQ ID NO: 8686 - DNA, 26 bp, Unknown
  Description of Unknown: gRNA target site sequence
agccggtcagaggggccaagagcagt

SEQ ID NO: 8687 - DNA, 26 bp, Unknown
  Description of Unknown: gRNA target site sequence
gcagtcctggccgggctggctgcggt

SEQ ID NO: 8688 - DNA, 26 bp, Unknown
  Description of Unknown: gRNA target site sequence
tgcctgtcccccagcttcctggtggt

SEQ ID NO: 8689 - DNA, 26 bp, Unknown
  Description of Unknown: gRNA target site sequence
ccctttaaataatttcaggaatgggt

SEQ ID NO: 8690 - DNA, 26 bp, Unknown
  Description of Unknown: gRNA target site sequence
cctgcctcagcgccacctcttaaggt

SEQ ID NO: 8691 - DNA, 26 bp, Unknown
  Description of Unknown: gRNA target site sequence
gtatgggcattgctgccctgggcagt

SEQ ID NO: 8692 - DNA, 26 bp, Unknown
  Description of Unknown: gRNA target site sequence
cacttctgccctcccaacacccaggt

SEQ ID NO: 8693 - DNA, 26 bp, Unknown
  Description of Unknown: gRNA target site sequence
ccggggcaggggtgagctgagccggt

SEQ ID NO: 8694 - DNA, 26 bp, Unknown
  Description of Unknown: gRNA target site sequence
gccctgtgtccctgagcagacggagt

SEQ ID NO: 8695 - DNA, 26 bp, Unknown
  Description of Unknown: gRNA target site sequence
gcagccccctcctcctctgagctggt

SEQ ID NO: 8696 - DNA, 26 bp, Unknown
  Description of Unknown: gRNA target site sequence
tctggaagcaccccagcccctctagt

SEQ ID NO: 8697 - DNA, 26 bp, Unknown
  Description of Unknown: gRNA target site sequence
gggcctggccctggcagcccaggggt

SEQ ID NO: 8698 - DNA, 26 bp, Unknown
  Description of Unknown: gRNA target site sequence
cacataggaatctgtggggacacggt

SEQ ID NO: 8699 - DNA, 26 bp, Unknown
  Description of Unknown: gRNA target site sequence
ttactgggcctaggctggggctgggt

SEQ ID NO: 8700 - DNA, 26 bp, Unknown
  Description of Unknown: gRNA target site sequence
tcccaccagggcctgggtgggaaggt

SEQ ID NO: 8701 - DNA, 26 bp, Unknown
  Description of Unknown: gRNA target site sequence
gtgggccgaaccgtgtccccacagat

SEQ ID NO: 8702 - DNA, 26 bp, Unknown
  Description of Unknown: gRNA target site sequence
gcctccacattttccagcaagacagt

SEQ ID NO: 8703 - DNA, 26 bp, Unknown
  Description of Unknown: gRNA target site sequence
tgaggctgtgtgtggagggtgctggt

SEQ ID NO: 8704 - DNA, 26 bp, Unknown
  Description of Unknown: gRNA target site sequence
cacctgggtgttgggagggcagaagt

SEQ ID NO: 8705 - DNA, 26 bp, Unknown
  Description of Unknown: gRNA target site sequence
tagaggacctggcaggggtgaggagt

SEQ ID NO: 8706 - DNA, 26 bp, Unknown
  Description of Unknown: gRNA target site sequence
agttacaagaacaatgcacagatggt

SEQ ID NO: 8707 - DNA, 26 bp, Unknown
  Description of Unknown: gRNA target site sequence
tccctgtggttctattatattataat

SEQ ID NO: 8708 - DNA, 26 bp, Unknown
  Description of Unknown: gRNA target site sequence
ctcatagtggggggcccaggttcggt

SEQ ID NO: 8709 - DNA, 26 bp, Unknown
  Description of Unknown: gRNA target site sequence
cattgctgccctgggcagtgggcagt

SEQ ID NO: 8710 - DNA, 26 bp, Unknown
  Description of Unknown: gRNA target site sequence
tagaaacaccccaaatctaacttgat

SEQ ID NO: 8711 - DNA, 26 bp, Unknown
  Description of Unknown: gRNA target site sequence
cccctcgaggctcctgccccgggggt

SEQ ID NO: 8712 - DNA, 26 bp, Unknown
  Description of Unknown: gRNA target site sequence
tttgcccagaatctccagttctgagt

SEQ ID NO: 8713 - DNA, 26 bp, Unknown
  Description of Unknown: gRNA target site sequence
gtgttggagaagctgcaggtgaaggt

SEQ ID NO: 8714 - DNA, 26 bp, Unknown
  Description of Unknown: gRNA target site sequence
ggctctgccttcatctctgcacgggt

SEQ ID NO: 8715 - DNA, 26 bp, Unknown
  Description of Unknown: gRNA target site sequence
ccaggctgaggctgtgtgtggagggt

SEQ ID NO: 8716 - DNA, 26 bp, Unknown
  Description of Unknown: gRNA target site sequence
ccttccaccctcagtccctggcaggt

SEQ ID NO: 8717 - DNA, 26 bp, Unknown
  Description of Unknown: gRNA target site sequence
ggcagggcaggccgaggggctgggat

SEQ ID NO: 8718 - DNA, 26 bp, Unknown
  Description of Unknown: gRNA target site sequence
aaagcaaatgtgtcaatattcttagt

SEQ ID NO: 8719 - DNA, 26 bp, Unknown
  Description of Unknown: gRNA target site sequence
gaggacagttcttctgtctccaggat

SEQ ID NO: 8720 - DNA, 26 bp, Unknown
  Description of Unknown: gRNA target site sequence
tggcatgcctcggtttccccactggt

SEQ ID NO: 8721 - DNA, 26 bp, Unknown
  Description of Unknown: gRNA target site sequence
caacccctttaaataatttcaggaat

SEQ ID NO: 8722 - DNA, 26 bp, Unknown
  Description of Unknown: gRNA target site sequence
tgcccacccaggaaggaaggcacagt

SEQ ID NO: 8723 - DNA, 26 bp, Unknown
  Description of Unknown: gRNA target site sequence
ccggggccaccactcccacctcaggt

SEQ ID NO: 8724 - DNA, 26 bp, Unknown
  Description of Unknown: gRNA target site sequence
gcctccatgacacatatttttaaagt

SEQ ID NO: 8725 - DNA, 26 bp, Unknown
  Description of Unknown: gRNA target site sequence
tacactttggatataatgagaaaaat

SEQ ID NO: 8726 - DNA, 26 bp, Unknown
  Description of Unknown: gRNA target site sequence
ggaggaggtggcctgaggactggggt

SEQ ID NO: 8727 - DNA, 26 bp, Unknown
  Description of Unknown: gRNA target site sequence
atggagaccccagccctgggaggagt

SEQ ID NO: 8728 - DNA, 26 bp, Unknown
  Description of Unknown: gRNA target site sequence
agctgcctgcgtccagctccctgaat

SEQ ID NO: 8729 - DNA, 26 bp, Unknown
  Description of Unknown: gRNA target site sequence
tgagtctcactcttttcctgcatgat

SEQ ID NO: 8730 - DNA, 26 bp, Unknown
  Description of Unknown: gRNA target site sequence
gacctggcaggggtgaggagtgaggt

SEQ ID NO: 8731 - DNA, 26 bp, Unknown
  Description of Unknown: gRNA target site sequence
cctggctgcctgctggccctgagagt

SEQ ID NO: 8732 - DNA, 26 bp, Unknown
  Description of Unknown: gRNA target site sequence
ggccagatgcagtcactgcttcaggt

SEQ ID NO: 8733 - DNA, 26 bp, Unknown
  Description of Unknown: gRNA target site sequence
agcatgctctcatatttaattataat

SEQ ID NO: 8734 - DNA, 26 bp, Unknown
  Description of Unknown: gRNA target site sequence
cagcaaagatgcttcagagacgagat

SEQ ID NO: 8735 - DNA, 26 bp, Unknown
  Description of Unknown: gRNA target site sequence
tggtgcaagccagacaggaaaagggt

SEQ ID NO: 8736 - DNA, 26 bp, Unknown
  Description of Unknown: gRNA target site sequence
atctggggccccagcccacctgcggt

SEQ ID NO: 8737 - DNA, 26 bp, Unknown
  Description of Unknown: gRNA target site sequence
accctgcctgcttctcctgaggaaat

SEQ ID NO: 8738 - DNA, 26 bp, Unknown
  Description of Unknown: gRNA target site sequence
acagggctcggggagagccctggaat

SEQ ID NO: 8739 - DNA, 26 bp, Unknown
  Description of Unknown: gRNA target site sequence
agctgcccctcctgaggctgccgggt

SEQ ID NO: 8740 - DNA, 26 bp, Unknown
  Description of Unknown: gRNA target site sequence
aatattcttagttattgattctaggt

SEQ ID NO: 8741 - DNA, 26 bp, Unknown
  Description of Unknown: gRNA target site sequence
accacgagcagggctggggagaaggt

SEQ ID NO: 8742 - DNA, 26 bp, Unknown
  Description of Unknown: gRNA target site sequence
caggctctgtttaaaagccactcggt

SEQ ID NO: 8743 - DNA, 26 bp, Unknown
  Description of Unknown: gRNA target site sequence
ggagggggtaggactggggagagggt

SEQ ID NO: 8744 - DNA, 26 bp, Unknown
  Description of Unknown: gRNA target site sequence
tgtcccaccactgccctctgtgtgat

SEQ ID NO: 8745 - DNA, 26 bp, Unknown
  Description of Unknown: gRNA target site sequence
ccctgccccaggagtgggggtgcagt

SEQ ID NO: 8746 - DNA, 26 bp, Unknown
  Description of Unknown: gRNA target site sequence
caccaccgcaggcagcccctcggggt

SEQ ID NO: 8747 - DNA, 26 bp, Unknown
  Description of Unknown: gRNA target site sequence
gccctgccctctgggtttctgggaat

SEQ ID NO: 8748 - DNA, 26 bp, Unknown
  Description of Unknown: gRNA target site sequence
gcccacagtgagcccaggcagcaggt

SEQ ID NO: 8749 - DNA, 26 bp, Unknown
  Description of Unknown: gRNA target site sequence
ggtaagatgagggcacagggctgggt

SEQ ID NO: 8750 - DNA, 26 bp, Unknown
  Description of Unknown: gRNA target site sequence
ttgaggcccagtggctgagggctggt

SEQ ID NO: 8751 - DNA, 26 bp, Unknown
  Description of Unknown: gRNA target site sequence
aaaaatatgtgtcatggaggccagat

SEQ ID NO: 8752 - DNA, 26 bp, Unknown
  Description of Unknown: gRNA target site sequence
cccctcccagctgtggccacctgggt

SEQ ID NO: 8753 - DNA, 26 bp, Unknown
  Description of Unknown: gRNA target site sequence
tggggaggtggggtcctggctataat

SEQ ID NO: 8754 - DNA, 26 bp, Unknown
  Description of Unknown: gRNA target site sequence
cctgccagggactgagggtggaaggt

SEQ ID NO: 8755 - DNA, 26 bp, Unknown
  Description of Unknown: gRNA target site sequence
agagatgaaggcagagcctgggggat

SEQ ID NO: 8756 - DNA, 26 bp, Unknown
  Description of Unknown: gRNA target site sequence
atctccctggcccccaaggcgcagat

SEQ ID NO: 8757 - DNA, 26 bp, Unknown
  Description of Unknown: gRNA target site sequence
ccgcggctccacagcctggctgcagt

SEQ ID NO: 8758 - DNA, 26 bp, Unknown
  Description of Unknown: gRNA target site sequence
gccccaactcctcccctggcccaagt

SEQ ID NO: 8759 - DNA, 26 bp, Unknown
  Description of Unknown: gRNA target site sequence
gtgctggctggacaccagaggtgggt

SEQ ID NO: 8760 - DNA, 26 bp, Unknown
  Description of Unknown: gRNA target site sequence
ggttgctgcctgggggctggggaggt

SEQ ID NO: 8761 - DNA, 26 bp, Unknown
  Description of Unknown: gRNA target site sequence
attttaaacggactattttgaaaaat

SEQ ID NO: 8762 - DNA, 26 bp, Unknown
  Description of Unknown: gRNA target site sequence
tagtaggaaatcagggagacccaagt

SEQ ID NO: 8763 - DNA, 26 bp, Unknown
  Description of Unknown: gRNA target site sequence
agggagatggccccacagaggtaggt

SEQ ID NO: 8764 - DNA, 26 bp, Unknown
  Description of Unknown: gRNA target site sequence
ggccgggctcccaccagggcctgggt

SEQ ID NO: 8765 - DNA, 26 bp, Unknown
  Description of Unknown: gRNA target site sequence
gctgagtgccctgtgctgttaccagt

SEQ ID NO: 8766 - DNA, 26 bp, Unknown
  Description of Unknown: gRNA target site sequence
tgctcagcttctcctggctggggggt

SEQ ID NO: 8767 - DNA, 26 bp, Unknown
  Description of Unknown: gRNA target site sequence
gacagtccctctgggccctgctgggt

SEQ ID NO: 8768 - DNA, 26 bp, Unknown
  Description of Unknown: gRNA target site sequence
agccctgtgccctcatcttacctagt

SEQ ID NO: 8769 - DNA, 26 bp, Unknown
  Description of Unknown: gRNA target site sequence
tatgtgtcatggaggccagatgcagt

SEQ ID NO: 8770 - DNA, 26 bp, Unknown
  Description of Unknown: gRNA target site sequence
agtcctgtggtggggctgtgcctggt

SEQ ID NO: 8771 - DNA, 26 bp, Unknown
  Description of Unknown: gRNA target site sequence
agagccctggactggagctggggggt

SEQ ID NO: 8772 - DNA, 26 bp, Unknown
  Description of Unknown: gRNA target site sequence
tggggatgccaaggcctggggagggt

SEQ ID NO: 8773 - DNA, 26 bp, Unknown
  Description of Unknown: gRNA target site sequence
gaagaggctctgcagtggaggccagt

SEQ ID NO: 8774 - DNA, 26 bp, Unknown
  Description of Unknown: gRNA target site sequence
gactttaaaaatcagactttaaaaat

SEQ ID NO: 8775 - DNA, 26 bp, Unknown
  Description of Unknown: gRNA target site sequence
tgctggggcctctgccacccggggat

SEQ ID NO: 8776 - DNA, 26 bp, Unknown
  Description of Unknown: gRNA target site sequence
gacttcaaaagtttgactttaaaaat

SEQ ID NO: 8777 - DNA, 26 bp, Unknown
  Description of Unknown: gRNA target site sequence
ggctggcctgggtgaggggctggggt

SEQ ID NO: 8778 - DNA, 26 bp, Unknown
  Description of Unknown: gRNA target site sequence
cgccacccagcacccccacactgggt

SEQ ID NO: 8779 - DNA, 26 bp, Unknown
  Description of Unknown: gRNA target site sequence
cccctcacccaggccagccggccagt

SEQ ID NO: 8780 - DNA, 26 bp, Unknown
  Description of Unknown: gRNA target site sequence
gccccttggcaggctcagggtccagt

SEQ ID NO: 8781 - DNA, 26 bp, Unknown
  Description of Unknown: gRNA target site sequence
ccattcctgaaattatttaaaggggt

SEQ ID NO: 8782 - DNA, 26 bp, Unknown
  Description of Unknown: gRNA target site sequence
ggggagtctgagagatggagagaggt

SEQ ID NO: 8783 - DNA, 26 bp, Unknown
  Description of Unknown: gRNA target site sequence
atttcctcaggagaagcaggcagggt

SEQ ID NO: 8784 - DNA, 26 bp, Unknown
  Description of Unknown: gRNA target site sequence
tcctgtctggtggctgtgggggcagt

SEQ ID NO: 8785 - DNA, 26 bp, Unknown
  Description of Unknown: gRNA target site sequence
acaggaagccaggcctgctggtcaat

SEQ ID NO: 8786 - DNA, 26 bp, Unknown
  Description of Unknown: gRNA target site sequence
gagagcctgcgggcagagctcagggt

SEQ ID NO: 8787 - DNA, 26 bp, Unknown
  Description of Unknown: gRNA target site sequence
catgacacatatttttaaagtctgat

SEQ ID NO: 8788 - DNA, 26 bp, Unknown
  Description of Unknown: gRNA target site sequence
cacactaccccacagccctccttggt

SEQ ID NO: 8789 - DNA, 26 bp, Unknown
  Description of Unknown: gRNA target site sequence
ttagttattgattctaggtgagggat

SEQ ID NO: 8790 - DNA, 26 bp, Unknown
  Description of Unknown: gRNA target site sequence
ggatcccttgtcccagccactcaggt

SEQ ID NO: 8791 - DNA, 26 bp, Unknown
  Description of Unknown: gRNA target site sequence
gtgcaggtgcaggctggagccccggt

SEQ ID NO: 8792 - DNA, 26 bp, Unknown
  Description of Unknown: gRNA target site sequence
cagggtggagggtcagggtcaggggt

SEQ ID NO: 8793 - DNA, 26 bp, Unknown
  Description of Unknown: gRNA target site sequence
ggcatttcccctgctctgtgccgagt

SEQ ID NO: 8794 - DNA, 26 bp, Unknown
  Description of Unknown: gRNA target site sequence
gcctccaccaactggctgggtggggt

SEQ ID NO: 8795 - DNA, 26 bp, Unknown
  Description of Unknown: gRNA target site sequence
cactgcccactgcccagggcagcaat

SEQ ID NO: 8796 - DNA, 26 bp, Unknown
  Description of Unknown: gRNA target site sequence
tgggtagttttcacagatgacccgat

SEQ ID NO: 8797 - DNA, 26 bp, Unknown
  Description of Unknown: gRNA target site sequence
cctcagaaggcggccttattaggaat

SEQ ID NO: 8798 - DNA, 26 bp, Unknown
  Description of Unknown: gRNA target site sequence
cttagcacttcctagccatgcagggt

SEQ ID NO: 8799 - DNA, 26 bp, Unknown
  Description of Unknown: gRNA target site sequence
gggtgcagtgtgtggatgtgaggagt

SEQ ID NO: 8800 - DNA, 26 bp, Unknown
  Description of Unknown: gRNA target site sequence
ggatgccaaggcctggggagggtggt

SEQ ID NO: 8801 - DNA, 26 bp, Unknown
  Description of Unknown: gRNA target site sequence
acattgagccagagaggaggggtggt

SEQ ID NO: 8802 - DNA, 26 bp, Unknown
  Description of Unknown: gRNA target site sequence
aagtgtcaggggctgggctgggtagt

SEQ ID NO: 8803 - DNA, 26 bp, Unknown
  Description of Unknown: gRNA target site sequence
cacccaggaaggaaggcacagtggat

SEQ ID NO: 8804 - DNA, 26 bp, Unknown
  Description of Unknown: gRNA target site sequence
aatatacaaaaacgtttaaaaacaat

SEQ ID NO: 8805 - DNA, 26 bp, Unknown
  Description of Unknown: gRNA target site sequence
accgcaggtgggctggggccccagat

SEQ ID NO: 8806 - DNA, 26 bp, Unknown
  Description of Unknown: gRNA target site sequence
ctgtctctaaaaaaaatggaagaaat

SEQ ID NO: 8807 - DNA, 26 bp, Unknown
  Description of Unknown: gRNA target site sequence
ggaatgcggcggcaggaggccagagt

SEQ ID NO: 8808 - DNA, 26 bp, Unknown
  Description of Unknown: gRNA target site sequence
gaggggacttgggccaggggaggagt

SEQ ID NO: 8809 - DNA, 26 bp, Unknown
  Description of Unknown: gRNA target site sequence
tggttctattatattataattataat

SEQ ID NO: 8810 - DNA, 26 bp, Unknown
  Description of Unknown: gRNA target site sequence
gcagtgtgtggatgtgaggagtggat

SEQ ID NO: 8811 - DNA, 26 bp, Unknown
  Description of Unknown: gRNA target site sequence
tatttttaaagtctgatttttaaagt

SEQ ID NO: 8812 - DNA, 26 bp, Unknown
  Description of Unknown: gRNA target site sequence
cagagctagaggacagagatgccggt

SEQ ID NO: 8813 - DNA, 26 bp, Unknown
  Description of Unknown: gRNA target site sequence
gacagagacagggagacagaggagat

SEQ ID NO: 8814 - DNA, 26 bp, Unknown
  Description of Unknown: gRNA target site sequence
tttgctctttgccttttgcccagaat

SEQ ID NO: 8815 - DNA, 26 bp, Unknown
  Description of Unknown: gRNA target site sequence
gcagccccccacccacccagaccagt

SEQ ID NO: 8816 - DNA, 26 bp, Unknown
  Description of Unknown: gRNA target site sequence
ctgctccccggggtggattccaaaat

SEQ ID NO: 8817 - DNA, 26 bp, Unknown
  Description of Unknown: gRNA target site sequence
atatttaattataattataatataat

SEQ ID NO: 8818 - DNA, 26 bp, Unknown
  Description of Unknown: gRNA target site sequence
gcaggccccgggagaggggccgaggt

SEQ ID NO: 8819 - DNA, 26 bp, Unknown
  Description of Unknown: gRNA target site sequence
tctttgaggagaaagggagagggagt

SEQ ID NO: 8820 - DNA, 26 bp, Unknown
  Description of Unknown: gRNA target site sequence
cttcctggcctcccttggctggtagt

SEQ ID NO: 8821 - DNA, 26 bp, Unknown
  Description of Unknown: gRNA target site sequence
gctaagtttccagttacaagaacaat

SEQ ID NO: 8822 - DNA, 26 bp, Unknown
  Description of Unknown: gRNA target site sequence
gccgggcctccctgcctggggaaggt

SEQ ID NO: 8823 - DNA, 26 bp, Unknown
  Description of Unknown: gRNA target site sequence
gatatttttctcattatatccaaagt

SEQ ID NO: 8824 - DNA, 26 bp, Unknown
  Description of Unknown: gRNA target site sequence
ataatagaaccacagggaagggggat

SEQ ID NO: 8825 - DNA, 26 bp, Unknown
  Description of Unknown: gRNA target site sequence
ggccacactcctcccagggctggggt

SEQ ID NO: 8826 - DNA, 26 bp, Unknown
  Description of Unknown: gRNA target site sequence
cagggctggggagaaggtgggggggt

SEQ ID NO: 8827 - DNA, 26 bp, Unknown
  Description of Unknown: gRNA target site sequence
tcctgggaggcagcctgggacagggt

SEQ ID NO: 8828 - DNA, 26 bp, Unknown
  Description of Unknown: gRNA target site sequence
gagcttgaaaagtcacattttggaat

SEQ ID NO: 8829 - DNA, 26 bp, Unknown
  Description of Unknown: gRNA target site sequence
ccaggatgcctcttttccctcctgat

SEQ ID NO: 8830 - DNA, 26 bp, Unknown
  Description of Unknown: gRNA target site sequence
acggggtcagggtggagggtcagggt

SEQ ID NO: 8831 - DNA, 26 bp, Unknown
  Description of Unknown: gRNA target site sequence
ctgtaccttcccacccaggccctggt

SEQ ID NO: 8832 - DNA, 26 bp, Unknown
  Description of Unknown: gRNA target site sequence
accttctccccagccctgctcgtggt

SEQ ID NO: 8833 - DNA, 26 bp, Unknown
  Description of Unknown: gRNA target site sequence
agggtggaggaaggggaggcgggagt

SEQ ID NO: 8834 - DNA, 26 bp, Unknown
  Description of Unknown: gRNA target site sequence
ctgcgagggcgtggggtgggcttggt

SEQ ID NO: 8835 - DNA, 26 bp, Unknown
  Description of Unknown: gRNA target site sequence
tatgggattccattgtttccccaggt

SEQ ID NO: 8836 - DNA, 26 bp, Unknown
  Description of Unknown: gRNA target site sequence
tctccctcccccaccctctccccagt

SEQ ID NO: 8837 - DNA, 26 bp, Unknown
  Description of Unknown: gRNA target site sequence
cgagagggagcacctggggaaacaat

SEQ ID NO: 8838 - DNA, 26 bp, Unknown
  Description of Unknown: gRNA target site sequence
ggcggggagatggggggaggtggggt

SEQ ID NO: 8839 - DNA, 26 bp, Unknown
  Description of Unknown: gRNA target site sequence
gatttttaaagtcaaacttttgaagt

SEQ ID NO: 8840 - DNA, 26 bp, Unknown
  Description of Unknown: gRNA target site sequence
gggacattgagccagagaggaggggt

SEQ ID NO: 8841 - DNA, 26 bp, Unknown
  Description of Unknown: gRNA target site sequence
tacaaaaacgtttaaaaacaatgaat

SEQ ID NO: 8842 - DNA, 26 bp, Unknown
  Description of Unknown: gRNA target site sequence
gccttctccactgctcaggcggaggt

SEQ ID NO: 8843 - DNA, 26 bp, Unknown
  Description of Unknown: gRNA target site sequence
gcacctgagtggctgggacaagggat

SEQ ID NO: 8844 - DNA, 26 bp, Unknown
  Description of Unknown: gRNA target site sequence
gccccggaggtcgagtgagccgagat

SEQ ID NO: 8845 - DNA, 26 bp, Unknown
  Description of Unknown: gRNA target site sequence
acacttttttgtttgtttcttttagt

SEQ ID NO: 8846 - DNA, 26 bp, Unknown
  Description of Unknown: gRNA target site sequence
agtctctgagactggctgggggaggt

SEQ ID NO: 8847 - DNA, 26 bp, Unknown
  Description of Unknown: gRNA target site sequence
ggagagaggtgaggaaggggctgggt

SEQ ID NO: 8848 - DNA, 26 bp, Unknown
  Description of Unknown: gRNA target site sequence
ctctcatatttaattataattataat

SEQ ID NO: 8849 - DNA, 26 bp, Unknown
  Description of Unknown: gRNA target site sequence
gctgcgtcctgaggattaaatcgggt

SEQ ID NO: 8850 - DNA, 26 bp, Unknown
  Description of Unknown: gRNA target site sequence
tcacagtcgtgtgtgtgtgtggaggt

SEQ ID NO: 8851 - DNA, 26 bp, Unknown
  Description of Unknown: gRNA target site sequence
caagtgtgtttctctgcagggacaat

SEQ ID NO: 8852 - DNA, 26 bp, Unknown
  Description of Unknown: gRNA target site sequence
tgggggaggaggggtgaggagggggt

SEQ ID NO: 8853 - DNA, 26 bp, Unknown
  Description of Unknown: gRNA target site sequence
ttgtttgtttcttttagtgacagggt

SEQ ID NO: 8854 - DNA, 26 bp, Unknown
  Description of Unknown: gRNA target site sequence
caaggtcaggagggcagggctggggt

SEQ ID NO: 8855 - DNA, 26 bp, Unknown
  Description of Unknown: gRNA target site sequence
cccctctcccacctcccccagccagt

SEQ ID NO: 8856 - DNA, 26 bp, Unknown
  Description of Unknown: gRNA target site sequence
gcccccaccccacccagccagttggt

SEQ ID NO: 8857 - DNA, 26 bp, Unknown
  Description of Unknown: gRNA target site sequence
cgtttttgtatatttttcaaaatagt

SEQ ID NO: 8858 - DNA, 26 bp, Unknown
  Description of Unknown: gRNA target site sequence
aaacgtttttgtatatttttcaaaat

SEQ ID NO: 8859 - DNA, 26 bp, Unknown
  Description of Unknown: gRNA target site sequence
ccaagggtcaggggctggggatgggt

SEQ ID NO: 8860 - DNA, 26 bp, Unknown
  Description of Unknown: gRNA target site sequence
agaggcagtgctgggggaggaggggt

SEQ ID NO: 8861 - DNA, 26 bp, Unknown
  Description of Unknown: gRNA target site sequence
gtccccacagattcctatgtggaagt

SEQ ID NO: 8862 - DNA, 26 bp, Unknown
  Description of Unknown: gRNA target site sequence
ggagacagaggagatggggaggaggt

SEQ ID NO: 8863 - DNA, 26 bp, Unknown
  Description of Unknown: gRNA target site sequence
tctagcccccaccccacccagccagt

SEQ ID NO: 8864 - DNA, 26 bp, Unknown
  Description of Unknown: gRNA target site sequence
tcactaaaagaaacaaacaaaaaagt

SEQ ID NO: 8865 - DNA, 26 bp, Unknown
  Description of Unknown: gRNA target site sequence
ggagatggggggaggtggggtggggt

SEQ ID NO: 8866 - DNA, 26 bp, Unknown
  Description of Unknown: gRNA target site sequence
aattgcttgagccccggaggtcgagt

SEQ ID NO: 8867 - DNA, 26 bp, Unknown
  Description of Unknown: gRNA target site sequence
aaaaagtgtcaggggctgggctgggt

SEQ ID NO: 8868 - DNA, 26 bp, Unknown
  Description of Unknown: gRNA target site sequence
ctgcctgggggctggggaggtggggt

SEQ ID NO: 8869 - DNA, 26 bp, Unknown
  Description of Unknown: gRNA target site sequence
ctgcccaaagccacacagctcagggt

SEQ ID NO: 8870 - DNA, 26 bp, Unknown
  Description of Unknown: gRNA target site sequence
ggcacgtgccaccctgccaggctaat

SEQ ID NO: 8871 - DNA, 26 bp, Unknown
  Description of Unknown: gRNA target site sequence
agtggtgtgaggggctggggtggaat

SEQ ID NO: 8872 - DNA, 26 bp, Unknown
  Description of Unknown: gRNA target site sequence
ctccccaggccttggcatccccaggt

SEQ ID NO: 8873 - DNA, 26 bp, Unknown
  Description of Unknown: gRNA target site sequence
gaggtggggtggggtgagggaagggt

SEQ ID NO: 8874 - DNA, 26 bp, Unknown
  Description of Unknown: gRNA target site sequence
ctattatattataattataattaaat

SEQ ID NO: 8875 - DNA, 26 bp, Unknown
  Description of Unknown: gRNA target site sequence
ggccaggaagccttcctggaggaggt

SEQ ID NO: 8876 - DNA, 26 bp, Unknown
  Description of Unknown: gRNA target site sequence
aatggaagaaattagcctggcagggt

SEQ ID NO: 8877 - DNA, 26 bp, Unknown
  Description of Unknown: gRNA target site sequence
tcttccattttttttagagacagggt

SEQ ID NO: 8878 - DNA, 26 bp, Unknown
  Description of Unknown: gRNA target site sequence
tggggttaggacttccacataggaat

SEQ ID NO: 8879 - DNA, 26 bp, Unknown
  Description of Unknown: gRNA target site sequence
ctatgttccccaggctgggctcaaat

SEQ ID NO: 8880 - DNA, 26 bp, Unknown
  Description of Unknown: gRNA target site sequence
cactcgacctccggggctcaagcaat

SEQ ID NO: 8881 - DNA, 26 bp, Unknown
  Description of Unknown: gRNA target site sequence
ctggcagggtggcacgtgcctatagt

SEQ ID NO: 8882 - DNA, 26 bp, Unknown
  Description of Unknown: gRNA target site sequence
gggagaattgcttgagccccggaggt

SEQ ID NO: 8883 - DNA, 26 bp, Unknown
  Description of Unknown: gRNA target site sequence
agcgagaccctgtctctaaaaaaaat

SEQ ID NO: 8884 - DNA, 26 bp, Unknown
  Description of Unknown: gRNA target site sequence
acctcagcctccccaagtactgggat

SEQ ID NO: 8885 - DNA, 26 bp, Unknown
  Description of Unknown: gRNA target site sequence
tgttccccaggctgggctcaaatggt

SEQ ID NO: 8886 - DNA, 26 bp, Unknown
  Description of Unknown: gRNA target site sequence
aattctcccacctctgcctccagagt

SEQ ID NO: 8887 - DNA, 26 bp, Unknown
  Description of Unknown: gRNA target site sequence
atcccagtacttggggaggctgaggt

SEQ ID NO: 8888 - DNA, 26 bp, Unknown
  Description of Unknown: gRNA target site sequence
tactctggaggcagaggtgggagaat

SEQ ID NO: 8889 - DNA, 26 bp, Unknown
  Description of Unknown: gRNA target site sequence
cagatgcagtggcttatgcctgtaat

SEQ ID NO: 8890 - DNA, 26 bp, Unknown
  Description of Unknown: gRNA target site sequence
cagtggcttatgcctgtaatcccagt

SEQ ID NO: 8891 - DNA, 26 bp, Unknown
  Description of Unknown: gRNA target site sequence
gtcctcccacctcagcctccccaagt

SEQ ID NO: 8892 - DNA, 26 bp, Unknown
  Description of Unknown: gRNA target site sequence
gtcccagctactctggaggcagaggt

SEQ ID NO: 8893 - DNA, 26 bp, Unknown
  Description of Unknown: gRNA target site sequence
gcagcagcagcagcagcagcagagat

SEQ ID NO: 8894 - DNA, 26 bp, Unknown
  Description of Unknown: gRNA target site sequence
tcttgctctgtcacccaggctggagt

SEQ ID NO: 8895 - DNA, 26 bp, Unknown
  Description of Unknown: gRNA target site sequence
ctctgtcacccaggctggagtgcagt

SEQ ID NO: 8896 - DNA, 26 bp, Unknown
  Description of Unknown: gRNA target site sequence
tgtcacccaggctggagtgcagtggt

SEQ ID NO: 8897 - DNA, 26 bp, Unknown
  Description of Unknown: gRNA target site sequence
cccaggctggagtgcagtggtgtgat

SEQ ID NO: 8898 - DNA, 26 bp, Unknown
  Description of Unknown: gRNA target site sequence
tcacaccactgcactccagcctgggt

SEQ ID NO: 8899 - DNA, 27 bp, Unknown
  Description of Unknown: gRNA target site sequence
gaggtggggtcctggctataatagaat

SEQ ID NO: 8900 - DNA, 27 bp, Unknown
  Description of Unknown: gRNA target site sequence
caggccttcccctcgctgtcccagaaa

SEQ ID NO: 8901 - DNA, 27 bp, Unknown
  Description of Unknown: gRNA target site sequence
cctcacctagaatcaataactaagaat

SEQ ID NO: 8902 - DNA, 27 bp, Unknown
  Description of Unknown: gRNA target site sequence
gaggggtcctccttctttgaggagaaa

SEQ ID NO: 8903 - DNA, 27 bp, Unknown
  Description of Unknown: gRNA target site sequence
tggggaaacaatggaatcccatagaaa

SEQ ID NO: 8904 - DNA, 27 bp, Unknown
  Description of Unknown: gRNA target site sequence
ctggctcctattgtccctgcagagaaa

SEQ ID NO: 8905 - DNA, 27 bp, Unknown
  Description of Unknown: gRNA target site sequence
ccttggggctgcgtgtttctgtagaat

SEQ ID NO: 8906 - DNA, 27 bp, Unknown
  Description of Unknown: gRNA target site sequence
ccagcctgacccgtcattctacagaaa

SEQ ID NO: 8907 - DNA, 27 bp, Unknown
  Description of Unknown: gRNA target site sequence
aaacaatgaatatccctcacctagaat

SEQ ID NO: 8908 - DNA, 27 bp, Unknown
  Description of Unknown: gRNA target site sequence
cctgggtccccactgcattcccagaaa

SEQ ID NO: 8909 - DNA, 27 bp, Unknown
  Description of Unknown: gRNA target site sequence
caggtacactttggatataatgagaaa

SEQ ID NO: 8910 - DNA, 27 bp, Unknown
  Description of Unknown: gRNA target site sequence
attttggaatcctaaatctgcaagaat

SEQ ID NO: 8911 - DNA, 27 bp, Unknown
  Description of Unknown: gRNA target site sequence
ccccgttgaggccagttcccccagaaa

SEQ ID NO: 8912 - DNA, 27 bp, Unknown
  Description of Unknown: gRNA target site sequence
ctcctgtctccaatgtaagataagaaa

SEQ ID NO: 8913 - DNA, 27 bp, Unknown
  Description of Unknown: gRNA target site sequence
ctttgctctttgccttttgcccagaat

SEQ ID NO: 8914 - DNA, 27 bp, Unknown
  Description of Unknown: gRNA target site sequence
agagcaagaccctgtcactaaaagaaa

SEQ ID NO: 8915 - DNA, 27 bp, Unknown
  Description of Unknown: gRNA target site sequence
ccctgtctctaaaaaaaatggaagaaa

SEQ ID NO: 8916 - DNA, 27 bp, Unknown
  Description of Unknown: gRNA target site sequence
ctactctggaggcagaggtgggagaat

SEQ ID NO: 8917 - DNA, 28 bp, Unknown
  Description of Unknown: gRNA target site sequence
ctcctggcaaggctgcgtcctgaggatt

SEQ ID NO: 8918 - DNA, 28 bp, Unknown
  Description of Unknown: gRNA target site sequence
ttctctgtggactatggggagctggatt

SEQ ID NO: 8919 - DNA, 28 bp, Unknown
  Description of Unknown: gRNA target site sequence
cagctggacctgctccccggggtggatt

SEQ ID NO: 8920 - DNA, 28 bp, Unknown
  Description of Unknown: gRNA target site sequence
cctggctctgacttgggtctccctgatt

SEQ ID NO: 8921 - DNA, 28 bp, Unknown
  Description of Unknown: gRNA target site sequence
tctccaggatccctcctgggtggggatt

SEQ ID NO: 8922 - DNA, 28 bp, Unknown
  Description of Unknown: gRNA target site sequence
tccctggcattcttgcagatttaggatt

SEQ ID NO: 8923 - DNA, 28 bp, Unknown
  Description of Unknown: gRNA target site sequence
aaatccactctggagtggctggaagatt

SEQ ID NO: 8924 - DNA, 28 bp, Unknown
  Description of Unknown: gRNA target site sequence
tgtgcccgcctgggtctctgcccagatt

SEQ ID NO: 8925 - DNA, 28 bp, Unknown
  Description of Unknown: gRNA target site sequence
actggctggtcctggatcaagttagatt

SEQ ID NO: 8926 - DNA, 28 bp, Unknown
  Description of Unknown: gRNA target site sequence
tgaaatgtccctggcattcttgcagatt

SEQ ID NO: 8927 - DNA, 28 bp, Unknown
  Description of Unknown: gRNA target site sequence
ctgggtagttttcacagatgacccgatt

SEQ ID NO: 8928 - DNA, 28 bp, Unknown
  Description of Unknown: gRNA target site sequence
tgtgggccgaaccgtgtccccacagatt

SEQ ID NO: 8929 - DNA, 28 bp, Unknown
  Description of Unknown: gRNA target site sequence
ggtcactcaggactcagaactggagatt

SEQ ID NO: 8930 - DNA, 28 bp, Unknown
  Description of Unknown: gRNA target site sequence
gcccgagatgccatgcaacggggtgatt

SEQ ID NO: 8931 - DNA, 28 bp, Unknown
  Description of Unknown: gRNA target site sequence
gaatcttccagccactccagagtggatt

SEQ ID NO: 8932 - DNA, 28 bp, Unknown
  Description of Unknown: gRNA target site sequence
gttagatttggggtgtttctatgggatt

SEQ ID NO: 8933 - DNA, 28 bp, Unknown
  Description of Unknown: gRNA target site sequence
ggggccccagatcatggctttagggatt

SEQ ID NO: 8934 - DNA, 28 bp, Unknown
  Description of Unknown: gRNA target site sequence
aatgtgtcaatattcttagttattgatt

SEQ ID NO: 8935 - DNA, 28 bp, Unknown
  Description of Unknown: gRNA target site sequence
tttaaagtcaaacttttgaagtcagatt

SEQ ID NO: 8936 - DNA, 28 bp, Unknown
  Description of Unknown: gRNA target site sequence
agcagcagcagcagcagcagcagagatt

SEQ ID NO: 8937 - DNA, 28 bp, Unknown
  Description of Unknown: gRNA target site sequence
ccatgacacatatttttaaagtctgatt

SEQ ID NO: 8938 - DNA, 28 bp, Unknown
  Description of Unknown: gRNA target site sequence
cacctcagcctccccaagtactgggatt

SEQ ID NO: 8939 - DNA, 26 bp, Unknown
  Description of Unknown: gRNA target site sequence
gattaaatcgggtcatctgtgaaaac

SEQ ID NO: 8940 - DNA, 26 bp, Unknown
  Description of Unknown: gRNA target site sequence
ggggctcatcccatccttaggaaaac

SEQ ID NO: 8941 - DNA, 26 bp, Unknown
  Description of Unknown: gRNA target site sequence
gccgggttggggatatctcataaaac

SEQ ID NO: 8942 - DNA, 26 bp, Unknown
  Description of Unknown: gRNA target site sequence
aggaacacagagggtggccacaaaac

SEQ ID NO: 8943 - DNA, 26 bp, Unknown
  Description of Unknown: gRNA target site sequence
gcctctcccggctgtggcttaaaaac

SEQ ID NO: 8944 - DNA, 26 bp, Unknown
  Description of Unknown: gRNA target site sequence
gactattttgaaaaatatacaaaaac

SEQ ID NO: 8945 - DNA, 26 bp, Unknown
  Description of Unknown: gRNA target site sequence
aaaaatatacaaaaacgtttaaaaac

SEQ ID NO: 8946 - DNA, 27 bp, Unknown
  Description of Unknown: gRNA target site sequence
tttccatatcccgcccgagctgcccct

SEQ ID NO: 8947 - DNA, 27 bp, Unknown
  Description of Unknown: gRNA target site sequence
tttcccttccgctcacctccgcctgag

SEQ ID NO: 8948 - DNA, 27 bp, Unknown
  Description of Unknown: gRNA target site sequence
tttcactctcagtccctggcaggtcgg

SEQ ID NO: 8949 - DNA, 27 bp, Unknown
  Description of Unknown: gRNA target site sequence
tttgggcagctcgaactcctgggttcc

SEQ ID NO: 8950 - DNA, 27 bp, Unknown
  Description of Unknown: gRNA target site sequence
tttgctcctgggcaggcaggacctctg

SEQ ID NO: 8951 - DNA, 27 bp, Unknown
  Description of Unknown: gRNA target site sequence
tttctgtagaatgacgggtcaggctgg

SEQ ID NO: 8952 - DNA, 27 bp, Unknown
  Description of Unknown: gRNA target site sequence
tttggggttctggccagcctgacccgt

SEQ ID NO: 8953 - DNA, 27 bp, Unknown
  Description of Unknown: gRNA target site sequence
ttttcctaaggatgggatgagccccat

SEQ ID NO: 8954 - DNA, 27 bp, Unknown
  Description of Unknown: gRNA target site sequence
tttcctaaggatgggatgagccccatg

SEQ ID NO: 8955 - DNA, 27 bp, Unknown
  Description of Unknown: gRNA target site sequence
tttgacgtcgtaaagccaaggttagtc

SEQ ID NO: 8956 - DNA, 27 bp, Unknown
  Description of Unknown: gRNA target site sequence
tttacgacgtcaaagtttagatgagct

SEQ ID NO: 8957 - DNA, 27 bp, Unknown
  Description of Unknown: gRNA target site sequence
tttagatgagctggtgatatttttctc

SEQ ID NO: 8958 - DNA, 27 bp, Unknown
  Description of Unknown: gRNA target site sequence
tttggatataatgagaaaaatatcacc

SEQ ID NO: 8959 - DNA, 27 bp, Unknown
  Description of Unknown: gRNA target site sequence
tttttctcattatatccaaagtgtacc

SEQ ID NO: 8960 - DNA, 27 bp, Unknown
  Description of Unknown: gRNA target site sequence
ttttctcattatatccaaagtgtacct

SEQ ID NO: 8961 - DNA, 27 bp, Unknown
  Description of Unknown: gRNA target site sequence
tttctcattatatccaaagtgtacctg

SEQ ID NO: 8962 - DNA, 27 bp, Unknown
  Description of Unknown: gRNA target site sequence
tttcacccaggccaagcctaagacagt

SEQ ID NO: 8963 - DNA, 27 bp, Unknown
  Description of Unknown: gRNA target site sequence
tttgcccagaatctccagttctgagtc

SEQ ID NO: 8964 - DNA, 27 bp, Unknown
  Description of Unknown: gRNA target site sequence
ttttgcccagaatctccagttctgagt

SEQ ID NO: 8965 - DNA, 27 bp, Unknown
  Description of Unknown: gRNA target site sequence
tttgccttttgcccagaatctccagtt

SEQ ID NO: 8966 - DNA, 27 bp, Unknown
  Description of Unknown: gRNA target site sequence
tttgctctttgccttttgcccagaatc

SEQ ID NO: 8967 - DNA, 27 bp, Unknown
  Description of Unknown: gRNA target site sequence
tttggccctttgctctttgccttttgc

SEQ ID NO: 8968 - DNA, 27 bp, Unknown
  Description of Unknown: gRNA target site sequence
ttttggccctttgctctttgccttttg

SEQ ID NO: 8969 - DNA, 27 bp, Unknown
  Description of Unknown: gRNA target site sequence
tttcccgcctgggtcggggagggtggc

SEQ ID NO: 8970 - DNA, 27 bp, Unknown
  Description of Unknown: gRNA target site sequence
tttccccactggtaacagcacagggca

SEQ ID NO: 8971 - DNA, 27 bp, Unknown
  Description of Unknown: gRNA target site sequence
ttttccctcctgatctattcactgcgt

SEQ ID NO: 8972 - DNA, 27 bp, Unknown
  Description of Unknown: gRNA target site sequence
tttccctcctgatctattcactgcgtt

SEQ ID NO: 8973 - DNA, 27 bp, Unknown
  Description of Unknown: gRNA target site sequence
ttttatgagatatccccaacccggctg

SEQ ID NO: 8974 - DNA, 27 bp, Unknown
  Description of Unknown: gRNA target site sequence
tttatgagatatccccaacccggctgc

SEQ ID NO: 8975 - DNA, 27 bp, Unknown
  Description of Unknown: gRNA target site sequence
tttatgctcctgccctcggacggggcc

SEQ ID NO: 8976 - DNA, 27 bp, Unknown
  Description of Unknown: gRNA target site sequence
tttggcgtgggaccactgtgagctcca

SEQ ID NO: 8977 - DNA, 27 bp, Unknown
  Description of Unknown: gRNA target site sequence
tttgggtcatgggtgaggacgcctcct

SEQ ID NO: 8978 - DNA, 27 bp, Unknown
  Description of Unknown: gRNA target site sequence
tttaatcctcaggacgcagccttgcca

SEQ ID NO: 8979 - DNA, 27 bp, Unknown
  Description of Unknown: gRNA target site sequence
tttcacagatgacccgatttaatcctc

SEQ ID NO: 8980 - DNA, 27 bp, Unknown
  Description of Unknown: gRNA target site sequence
ttttcacagatgacccgatttaatcct

SEQ ID NO: 8981 - DNA, 27 bp, Unknown
  Description of Unknown: gRNA target site sequence
ttttttgtttgtttcttttagtgacag

SEQ ID NO: 8982 - DNA, 27 bp, Unknown
  Description of Unknown: gRNA target site sequence
tttttgtttgtttcttttagtgacagg

SEQ ID NO: 8983 - DNA, 27 bp, Unknown
  Description of Unknown: gRNA target site sequence
ttttgtttgtttcttttagtgacaggg

SEQ ID NO: 8984 - DNA, 27 bp, Unknown
  Description of Unknown: gRNA target site sequence
tttgtttgtttcttttagtgacagggt

SEQ ID NO: 8985 - DNA, 27 bp, Unknown
  Description of Unknown: gRNA target site sequence
tttgtttcttttagtgacagggtcttg

SEQ ID NO: 8986 - DNA, 27 bp, Unknown
  Description of Unknown: gRNA target site sequence
tttcttttagtgacagggtcttgctct

SEQ ID NO: 8987 - DNA, 27 bp, Unknown
  Description of Unknown: gRNA target site sequence
ttttagtgacagggtcttgctctgtca

SEQ ID NO: 8988 - DNA, 27 bp, Unknown
  Description of Unknown: gRNA target site sequence
tttagtgacagggtcttgctctgtcac

SEQ ID NO: 8989 - DNA, 27 bp, Unknown
  Description of Unknown: gRNA target site sequence
tttcttccattttttttagagacaggg

SEQ ID NO: 8990 - DNA, 27 bp, Unknown
  Description of Unknown: gRNA target site sequence
ttttttttagagacagggtctcgctat

SEQ ID NO: 8991 - DNA, 27 bp, Unknown
  Description of Unknown: gRNA target site sequence
tttttttagagacagggtctcgctatg

SEQ ID NO: 8992 - DNA, 27 bp, Unknown
  Description of Unknown: gRNA target site sequence
ttttttagagacagggtctcgctatgt

SEQ ID NO: 8993 - DNA, 27 bp, Unknown
  Description of Unknown: gRNA target site sequence
tttttagagacagggtctcgctatgtt

SEQ ID NO: 8994 - DNA, 27 bp, Unknown
  Description of Unknown: gRNA target site sequence
ttttagagacagggtctcgctatgttc

SEQ ID NO: 8995 - DNA, 27 bp, Unknown
  Description of Unknown: gRNA target site sequence
tttagagacagggtctcgctatgttcc

SEQ ID NO: 8996 - DNA, 27 bp, Unknown
  Description of Unknown: gRNA target site sequence
tttgagcccagcctggggaacatagcg

SEQ ID NO: 8997 - DNA, 27 bp, Unknown
  Description of Unknown: gRNA target site sequence
tttaaaaatatgtgtcatggaggccag

SEQ ID NO: 8998 - DNA, 27 bp, Unknown
  Description of Unknown: gRNA target site sequence
tttaaaaatcagactttaaaaatatgt

SEQ ID NO: 8999 - DNA, 27 bp, Unknown
  Description of Unknown: gRNA target site sequence
tttttaaagtctgatttttaaagtcaa

SEQ ID NO: 9000 - DNA, 27 bp, Unknown
  Description of Unknown: gRNA target site sequence
ttttaaagtctgatttttaaagtcaaa

SEQ ID NO: 9001 - DNA, 27 bp, Unknown
  Description of Unknown: gRNA target site sequence
tttgactttaaaaatcagactttaaaa

SEQ ID NO: 9002 - DNA, 27 bp, Unknown
  Description of Unknown: gRNA target site sequence
tttaaagtctgatttttaaagtcaaac

SEQ ID NO: 9003 - DNA, 27 bp, Unknown
  Description of Unknown: gRNA target site sequence
tttttaaagtcaaacttttgaagtcag

SEQ ID NO: 9004 - DNA, 27 bp, Unknown
  Description of Unknown: gRNA target site sequence
ttttaaagtcaaacttttgaagtcaga

SEQ ID NO: 9005 - DNA, 27 bp, Unknown
  Description of Unknown: gRNA target site sequence
tttaaagtcaaacttttgaagtcagat

SEQ ID NO: 9006 - DNA, 27 bp, Unknown
  Description of Unknown: gRNA target site sequence
tttaaaatctgacttcaaaagtttgac

SEQ ID NO: 9007 - DNA, 27 bp, Unknown
  Description of Unknown: gRNA target site sequence
ttttgaagtcagattttaaacggacta

SEQ ID NO: 9008 - DNA, 27 bp, Unknown
  Description of Unknown: gRNA target site sequence
tttgaagtcagattttaaacggactat

SEQ ID NO: 9009 - DNA, 27 bp, Unknown
  Description of Unknown: gRNA target site sequence
tttcaaaatagtccgtttaaaatctga

SEQ ID NO: 9010 - DNA, 27 bp, Unknown
  Description of Unknown: gRNA target site sequence
ttttcaaaatagtccgtttaaaatctg

SEQ ID NO: 9011 - DNA, 27 bp, Unknown
  Description of Unknown: gRNA target site sequence
tttttcaaaatagtccgtttaaaatct

SEQ ID NO: 9012 - DNA, 27 bp, Unknown
  Description of Unknown: gRNA target site sequence
ttttaaacggactattttgaaaaatat

SEQ ID NO: 9013 - DNA, 27 bp, Unknown
  Description of Unknown: gRNA target site sequence
tttaaacggactattttgaaaaatata

SEQ ID NO: 9014 - DNA, 27 bp, Unknown
  Description of Unknown: gRNA target site sequence
tttgtatatttttcaaaatagtccgtt

SEQ ID NO: 9015 - DNA, 27 bp, Unknown
  Description of Unknown: gRNA target site sequence
ttttgtatatttttcaaaatagtccgt

SEQ ID NO: 9016 - DNA, 27 bp, Unknown
  Description of Unknown: gRNA target site sequence
tttttgtatatttttcaaaatagtccg

SEQ ID NO: 9017 - DNA, 27 bp, Unknown
  Description of Unknown: gRNA target site sequence
ttttgaaaaatatacaaaaacgtttaa

SEQ ID NO: 9018 - DNA, 27 bp, Unknown
  Description of Unknown: gRNA target site sequence
tttgaaaaatatacaaaaacgtttaaa

SEQ ID NO: 9019 - DNA, 27 bp, Unknown
  Description of Unknown: gRNA target site sequence
tttaaacgtttttgtatatttttcaaa

SEQ ID NO: 9020 - DNA, 27 bp, Unknown
  Description of Unknown: gRNA target site sequence
ttttaaacgtttttgtatatttttcaa

SEQ ID NO: 9021 - DNA, 27 bp, Unknown
  Description of Unknown: gRNA target site sequence
tttttaaacgtttttgtatatttttca

SEQ ID NO: 9022 - DNA, 27 bp, Unknown
  Description of Unknown: gRNA target site sequence
tttaaaaacaatgaatatccctcacct

SEQ ID NO: 9023 - DNA, 27 bp, Unknown
  Description of Unknown: gRNA target site sequence
tttgctttggggactgggcggctggag

SEQ ID NO: 9024 - DNA, 27 bp, Unknown
  Description of Unknown: gRNA target site sequence
tttggggactgggcggctggagctgcc

SEQ ID NO: 9025 - DNA, 27 bp, Unknown
  Description of Unknown: gRNA target site sequence
tttgtcatggcagctccagccgcccag

SEQ ID NO: 9026 - DNA, 27 bp, Unknown
  Description of Unknown: gRNA target site sequence
tttaaaagccactcggtcggcggagct

SEQ ID NO: 9027 - DNA, 27 bp, Unknown
  Description of Unknown: gRNA target site sequence
ttttaaacagagcctgccctctcgccg

SEQ ID NO: 9028 - DNA, 27 bp, Unknown
  Description of Unknown: gRNA target site sequence
tttaaacagagcctgccctctcgccga

SEQ ID NO: 9029 - DNA, 27 bp, Unknown
  Description of Unknown: gRNA target site sequence
tttaagccacagccgggagaggctgag

SEQ ID NO: 9030 - DNA, 27 bp, Unknown
  Description of Unknown: gRNA target site sequence
ttttaagccacagccgggagaggctga

SEQ ID NO: 9031 - DNA, 27 bp, Unknown
  Description of Unknown: gRNA target site sequence
tttttaagccacagccgggagaggctg

SEQ ID NO: 9032 - DNA, 27 bp, Unknown
  Description of Unknown: gRNA target site sequence
ttttgtggccaccctctgtgttcctgg

SEQ ID NO: 9033 - DNA, 27 bp, Unknown
  Description of Unknown: gRNA target site sequence
tttgtggccaccctctgtgttcctggg

SEQ ID NO: 9034 - DNA, 27 bp, Unknown
  Description of Unknown: gRNA target site sequence
tttccttgtccctaatgggaccacggt

SEQ ID NO: 9035 - DNA, 27 bp, Unknown
  Description of Unknown: gRNA target site sequence
tttccagaagcgcacagaagaaggctg

SEQ ID NO: 9036 - DNA, 27 bp, Unknown
  Description of Unknown: gRNA target site sequence
tttccccaggtgctccctctcggatcc

SEQ ID NO: 9037 - DNA, 27 bp, Unknown
  Description of Unknown: gRNA target site sequence
tttctatgggattccattgtttcccca

SEQ ID NO: 9038 - DNA, 27 bp, Unknown
  Description of Unknown: gRNA target site sequence
tttggggtgtttctatgggattccatt

SEQ ID NO: 9039 - DNA, 27 bp, Unknown
  Description of Unknown: gRNA target site sequence
tttggaatccaccccggggagcaggtc

SEQ ID NO: 9040 - DNA, 27 bp, Unknown
  Description of Unknown: gRNA target site sequence
ttttggaatccaccccggggagcaggt

SEQ ID NO: 9041 - DNA, 27 bp, Unknown
  Description of Unknown: gRNA target site sequence
tttcctgtctggcttgcaccagccctc

SEQ ID NO: 9042 - DNA, 27 bp, Unknown
  Description of Unknown: gRNA target site sequence
ttttcctgtctggcttgcaccagccct

SEQ ID NO: 9043 - DNA, 27 bp, Unknown
  Description of Unknown: gRNA target site sequence
tttgcacacattggtggagggacctgc

SEQ ID NO: 9044 - DNA, 27 bp, Unknown
  Description of Unknown: gRNA target site sequence
tttatttgcacacattggtggagggac

SEQ ID NO: 9045 - DNA, 27 bp, Unknown
  Description of Unknown: gRNA target site sequence
tttccagttacaagaacaatgcacaga

SEQ ID NO: 9046 - DNA, 27 bp, Unknown
  Description of Unknown: gRNA target site sequence
tttctgggaatgcagtggggacccagg

SEQ ID NO: 9047 - DNA, 27 bp, Unknown
  Description of Unknown: gRNA target site sequence
tttcccctgctctgtgccgagtccacc

SEQ ID NO: 9048 - DNA, 27 bp, Unknown
  Description of Unknown: gRNA target site sequence
tttgaccaaggagggctgtggggtagt

SEQ ID NO: 9049 - DNA, 27 bp, Unknown
  Description of Unknown: gRNA target site sequence
ttttgaccaaggagggctgtggggtag

SEQ ID NO: 9050 - DNA, 27 bp, Unknown
  Description of Unknown: gRNA target site sequence
tttgaagtgaccttgaggccacccagg

SEQ ID NO: 9051 - DNA, 27 bp, Unknown
  Description of Unknown: gRNA target site sequence
tttggggaaccctgtggcatgggacct

SEQ ID NO: 9052 - DNA, 27 bp, Unknown
  Description of Unknown: gRNA target site sequence
tttcccggctcacccacaggtcccatg

SEQ ID NO: 9053 - DNA, 27 bp, Unknown
  Description of Unknown: gRNA target site sequence
ttttcccggctcacccacaggtcccat

SEQ ID NO: 9054 - DNA, 27 bp, Unknown
  Description of Unknown: gRNA target site sequence
tttcaggaggtccttgtcttgggagcc

SEQ ID NO: 9055 - DNA, 27 bp, Unknown
  Description of Unknown: gRNA target site sequence
tttgctgtgagctctagtccccactgt

SEQ ID NO: 9056 - DNA, 27 bp, Unknown
  Description of Unknown: gRNA target site sequence
tttccagcaagacagtggggactagag

SEQ ID NO: 9057 - DNA, 27 bp, Unknown
  Description of Unknown: gRNA target site sequence
ttttccagcaagacagtggggactaga

SEQ ID NO: 9058 - DNA, 27 bp, Unknown
  Description of Unknown: gRNA target site sequence
tttcaggacaagctcggagctgggacc

SEQ ID NO: 9059 - DNA, 27 bp, Unknown
  Description of Unknown: gRNA target site sequence
ttttcaggacaagctcggagctgggac

SEQ ID NO: 9060 - DNA, 27 bp, Unknown
  Description of Unknown: gRNA target site sequence
tttgcccccttttcaggacaagctcgg

SEQ ID NO: 9061 - DNA, 27 bp, Unknown
  Description of Unknown: gRNA target site sequence
tttgggggctacccatccccagcccct

SEQ ID NO: 9062 - DNA, 27 bp, Unknown
  Description of Unknown: gRNA target site sequence
tttctgggggaactggcctcaacgggg

SEQ ID NO: 9063 - DNA, 27 bp, Unknown
  Description of Unknown: gRNA target site sequence
tttcctactaagagccttcaccccctt

SEQ ID NO: 9064 - DNA, 27 bp, Unknown
  Description of Unknown: gRNA target site sequence
tttgtggggccacccagccccttcctc

SEQ ID NO: 9065 - DNA, 27 bp, Unknown
  Description of Unknown: gRNA target site sequence
tttagcacgaagctctccgatgtgttg

SEQ ID NO: 9066 - DNA, 27 bp, Unknown
  Description of Unknown: gRNA target site sequence
tttgatctgcgccttgggggccaggga

SEQ ID NO: 9067 - DNA, 27 bp, Unknown
  Description of Unknown: gRNA target site sequence
tttgtgcccttccagagagaagggcag

SEQ ID NO: 9068 - DNA, 27 bp, Unknown
  Description of Unknown: gRNA target site sequence
tttggaactggccggctggcctgggtg

SEQ ID NO: 9069 - DNA, 27 bp, Unknown
  Description of Unknown: gRNA target site sequence
tttctctgcagggacaataggagccag

SEQ ID NO: 9070 - DNA, 27 bp, Unknown
  Description of Unknown: gRNA target site sequence
ttttcctgcatgatccactgtgccttc

SEQ ID NO: 9071 - DNA, 27 bp, Unknown
  Description of Unknown: gRNA target site sequence
tttcctgcatgatccactgtgccttcc

SEQ ID NO: 9072 - DNA, 27 bp, Unknown
  Description of Unknown: gRNA target site sequence
tttagggattgaggttgctgcctgggg

SEQ ID NO: 9073 - DNA, 27 bp, Unknown
  Description of Unknown: gRNA target site sequence
tttcttatcttacattggagacaggag

SEQ ID NO: 9074 - DNA, 27 bp, Unknown
  Description of Unknown: gRNA target site sequence
tttcaagctctcctgtctccaatgtaa

SEQ ID NO: 9075 - DNA, 27 bp, Unknown
  Description of Unknown: gRNA target site sequence
ttttcaagctctcctgtctccaatgta

SEQ ID NO: 9076 - DNA, 27 bp, Unknown
  Description of Unknown: gRNA target site sequence
tttaggattccaaaatgtgacttttca

SEQ ID NO: 9077 - DNA, 27 bp, Unknown
  Description of Unknown: gRNA target site sequence
ttttggaatcctaaatctgcaagaatg

SEQ ID NO: 9078 - DNA, 27 bp, Unknown
  Description of Unknown: gRNA target site sequence
tttggaatcctaaatctgcaagaatgc

SEQ ID NO: 9079 - DNA, 27 bp, Unknown
  Description of Unknown: gRNA target site sequence
tttcagagggggacattgagccagaga

SEQ ID NO: 9080 - DNA, 27 bp, Unknown
  Description of Unknown: gRNA target site sequence
tttgaggagaaagggagagggagtcag

SEQ ID NO: 9081 - DNA, 27 bp, Unknown
  Description of Unknown: gRNA target site sequence
tttctcctcaaagaaggaggacccctc

SEQ ID NO: 9082 - DNA, 27 bp, Unknown
  Description of Unknown: gRNA target site sequence
tttccagtggcgagagaagaccccgga

SEQ ID NO: 9083 - DNA, 27 bp, Unknown
  Description of Unknown: gRNA target site sequence
tttcctagcggaatgggcacctcatcc

SEQ ID NO: 9084 - DNA, 27 bp, Unknown
  Description of Unknown: gRNA target site sequence
tttcctcaggagaagcaggcagggtgc

SEQ ID NO: 9085 - DNA, 27 bp, Unknown
  Description of Unknown: gRNA target site sequence
tttcgggatgccactgccaggggcacc

SEQ ID NO: 9086 - DNA, 27 bp, Unknown
  Description of Unknown: gRNA target site sequence
tttcagggaaggtcagaagagctcctg

SEQ ID NO: 9087 - DNA, 27 bp, Unknown
  Description of Unknown: gRNA target site sequence
tttcctgccctgcccaccacagccagg

SEQ ID NO: 9088 - DNA, 27 bp, Unknown
  Description of Unknown: gRNA target site sequence
tttacacatgcccaggcagcacctcag

SEQ ID NO: 9089 - DNA, 27 bp, Unknown
  Description of Unknown: gRNA target site sequence
tttgtggggcagggaagctgaggcagt

SEQ ID NO: 9090 - DNA, 27 bp, Unknown
  Description of Unknown: gRNA target site sequence
tttcaggcccagccagcactctggcct

SEQ ID NO: 9091 - DNA, 27 bp, Unknown
  Description of Unknown: gRNA target site sequence
tttcaggaatgggttccaaggagagct

SEQ ID NO: 9092 - DNA, 27 bp, Unknown
  Description of Unknown: gRNA target site sequence
tttaaataatttcaggaatgggttcca

SEQ ID NO: 9093 - DNA, 27 bp, Unknown
  Description of Unknown: gRNA target site sequence
tttaaaggggttggccgggctcccacc

SEQ ID NO: 9094 - DNA, 27 bp, Unknown
  Description of Unknown: gRNA target site sequence
tttaattataattataatataatagaa

SEQ ID NO: 9095 - DNA, 27 bp, Unknown
  Description of Unknown: gRNA target site sequence
tttctgggacagcgaggggaaggcctg

SEQ ID NO: 9096 - DNA, 27 bp, Unknown
  Description of Unknown: gRNA target site sequence
tttgccccactcacatgtagagccctc

SEQ ID NO: 9097 - DNA, 27 bp, Unknown
  Description of Unknown: gRNA target site sequence
tttcaccggagggctctacatgtgagt

SEQ ID NO: 9098 - DNA, 27 bp, Unknown
  Description of Unknown: gRNA target site sequence
ttttcaccggagggctctacatgtgag

SEQ ID NO: 9099 - DNA, 27 bp, Unknown
  Description of Unknown: gRNA target site sequence
tttttcaccggagggctctacatgtga

SEQ ID NO: 9100 - DNA, 27 bp, Unknown
  Description of Unknown: gRNA target site sequence
ttttaggggggtcccacggccccctgg

SEQ ID NO: 9101 - DNA, 27 bp, Unknown
  Description of Unknown: gRNA target site sequence
tttaggggggtcccacggccccctggc

SEQ ID NO: 9102 - DNA, 20 bp, Unknown
  Description of Unknown: gRNA target site sequence
ggagctgctgtgacttgctc

SEQ ID NO: 9103 - DNA, 20 bp, Unknown
  Description of Unknown: gRNA target site sequence
gagctgctgtgacttgctca

SEQ ID NO: 9104 - DNA, 20 bp, Unknown
  Description of Unknown: gRNA target site sequence
cttgctcaaggccttatatc

SEQ ID NO: 9105 - DNA, 20 bp, Unknown
  Description of Unknown: gRNA target site sequence
aaggccttatatcaagtaaa

SEQ ID NO: 9106 - DNA, 20 bp, Unknown
  Description of Unknown: gRNA target site sequence
gccttatatcaagtaaacgg

SEQ ID NO: 9107 - DNA, 20 bp, Unknown
  Description of Unknown: gRNA target site sequence
tatcaagtaaacggtagcgc

SEQ ID NO: 9108 - DNA, 20 bp, Unknown
  Description of Unknown: gRNA target site sequence
atcaagtaaacggtagcgct

SEQ ID NO: 9109 - DNA, 20 bp, Unknown
  Description of Unknown: gRNA target site sequence
tcaagtaaacggtagcgctg

SEQ ID NO: 9110 - DNA, 20 bp, Unknown
  Description of Unknown: gRNA target site sequence
taaacggtagcgctggggct

SEQ ID NO: 9111 - DNA, 20 bp, Unknown
  Description of Unknown: gRNA target site sequence
gtagcgctggggcttagacg

SEQ ID NO: 9112 - DNA, 20 bp, Unknown
  Description of Unknown: gRNA target site sequence
tagcgctggggcttagacgc

SEQ ID NO: 9113 - DNA, 20 bp, Unknown
  Description of Unknown: gRNA target site sequence
gacgcaggtgttctgattta

SEQ ID NO: 9114 - DNA, 20 bp, Unknown
  Description of Unknown: gRNA target site sequence
agttcaaaacctctatcaat

SEQ ID NO: 9115 - DNA, 20 bp, Unknown
  Description of Unknown: gRNA target site sequence
ttcaaaacctctatcaatga

SEQ ID NO: 9116 - DNA, 20 bp, Unknown
  Description of Unknown: gRNA target site sequence
caaaacctctatcaatgaga

SEQ ID NO: 9117 - DNA, 20 bp, Unknown
  Description of Unknown: gRNA target site sequence
tcaatgagagagcaatctcc

SEQ ID NO: 9118 - DNA, 20 bp, Unknown
  Description of Unknown: gRNA target site sequence
gcaatctcctggtaatgtga

SEQ ID NO: 9119 - DNA, 20 bp, Unknown
  Description of Unknown: gRNA target site sequence
cctcccattctgctaatgcc

SEQ ID NO: 9120 - DNA, 20 bp, Unknown
  Description of Unknown: gRNA target site sequence
attctgctaatgcccagcct

SEQ ID NO: 9121 - DNA, 20 bp, Unknown
  Description of Unknown: gRNA target site sequence
tgctaatgcccagcctaagt

SEQ ID NO: 9122 - DNA, 20 bp, Unknown
  Description of Unknown: gRNA target site sequence
gctaatgcccagcctaagtt

SEQ ID NO: 9123 - DNA, 20 bp, Unknown
  Description of Unknown: gRNA target site sequence
ctaatgcccagcctaagttg

SEQ ID NO: 9124 - DNA, 20 bp, Unknown
  Description of Unknown: gRNA target site sequence
aatgcccagcctaagttggg

SEQ ID NO: 9125 - DNA, 20 bp, Unknown
  Description of Unknown: gRNA target site sequence
ctaagttggggagaccactc

SEQ ID NO: 9126 - DNA, 20 bp, Unknown
  Description of Unknown: gRNA target site sequence
gggagaccactccagattcc

SEQ ID NO: 9127 - DNA, 20 bp, Unknown
  Description of Unknown: gRNA target site sequence
actccagattccaagatgta

SEQ ID NO: 9128 - DNA, 20 bp, Unknown
  Description of Unknown: gRNA target site sequence
agatgtacagtttgctttgc

SEQ ID NO: 9129 - DNA, 20 bp, Unknown
  Description of Unknown: gRNA target site sequence
gatgtacagtttgctttgct

SEQ ID NO: 9130 - DNA, 20 bp, Unknown
  Description of Unknown: gRNA target site sequence
catgcctgcctttactctgc

SEQ ID NO: 9131 - DNA, 20 bp, Unknown
  Description of Unknown: gRNA target site sequence
tgcctgcctttactctgcca

SEQ ID NO: 9132 - DNA, 20 bp, Unknown
  Description of Unknown: gRNA target site sequence
ctctgccagagttatattgc

SEQ ID NO: 9133 - DNA, 20 bp, Unknown
  Description of Unknown: gRNA target site sequence
tctgccagagttatattgct

SEQ ID NO: 9134 - DNA, 20 bp, Unknown
  Description of Unknown: gRNA target site sequence
ctgccagagttatattgctg

SEQ ID NO: 9135 - DNA, 20 bp, Unknown
  Description of Unknown: gRNA target site sequence
gttatattgctggggttttg

SEQ ID NO: 9136 - DNA, 20 bp, Unknown
  Description of Unknown: gRNA target site sequence
atattgctggggttttgaag

SEQ ID NO: 9137 - DNA, 20 bp, Unknown
  Description of Unknown: gRNA target site sequence
aagaagatcctattaaataa

SEQ ID NO: 9138 - DNA, 20 bp, Unknown
  Description of Unknown: gRNA target site sequence
atcctattaaataaaagaat

SEQ ID NO: 9139 - DNA, 20 bp, Unknown
  Description of Unknown: gRNA target site sequence
ctattaaataaaagaataag

SEQ ID NO: 9140 - DNA, 20 bp, Unknown
  Description of Unknown: gRNA target site sequence
aaagaataagcagtattatt

SEQ ID NO: 9141 - DNA, 20 bp, Unknown
  Description of Unknown: gRNA target site sequence
gaataagcagtattattaag

SEQ ID NO: 9142 - DNA, 20 bp, Unknown
  Description of Unknown: gRNA target site sequence
tattaagtagccctgcattt

SEQ ID NO: 9143 - DNA, 20 bp, Unknown
  Description of Unknown: gRNA target site sequence
attaagtagccctgcatttc

SEQ ID NO: 9144 - DNA, 20 bp, Unknown
  Description of Unknown: gRNA target site sequence
cctgcatttcaggtttcctt

SEQ ID NO: 9145 - DNA, 20 bp, Unknown
  Description of Unknown: gRNA target site sequence
gcatttcaggtttccttgag

SEQ ID NO: 9146 - DNA, 20 bp, Unknown
  Description of Unknown: gRNA target site sequence
tttcaggtttccttgagtgg

SEQ ID NO: 9147 - DNA, 20 bp, Unknown
  Description of Unknown: gRNA target site sequence
ttcaggtttccttgagtggc

SEQ ID NO: 9148 - DNA, 20 bp, Unknown
  Description of Unknown: gRNA target site sequence
ggtttccttgagtggcaggc

SEQ ID NO: 9149 - DNA, 20 bp, Unknown
  Description of Unknown: gRNA target site sequence
gtttccttgagtggcaggcc

SEQ ID NO: 9150 - DNA, 20 bp, Unknown
  Description of Unknown: gRNA target site sequence
cttgagtggcaggccaggcc

SEQ ID NO: 9151 - DNA, 20 bp, Unknown
  Description of Unknown: gRNA target site sequence
gtgaacgttcactgaaatca

SEQ ID NO: 9152 - DNA, 20 bp, Unknown
  Description of Unknown: gRNA target site sequence
tcactgaaatcatggcctct

SEQ ID NO: 9153 - DNA, 20 bp, Unknown
  Description of Unknown: gRNA target site sequence
gaaatcatggcctcttggcc

SEQ ID NO: 9154 - DNA, 20 bp, Unknown
  Description of Unknown: gRNA target site sequence
ggcctcttggccaagattga

SEQ ID NO: 9155 - DNA, 20 bp, Unknown
  Description of Unknown: gRNA target site sequence
gatagcttgtgcctgtccct

SEQ ID NO: 9156 - DNA, 20 bp, Unknown
  Description of Unknown: gRNA target site sequence
ttgtgcctgtccctgagtcc

SEQ ID NO: 9157 - DNA, 20 bp, Unknown
  Description of Unknown: gRNA target site sequence
cctgagtcccagtccatcac

SEQ ID NO: 9158 - DNA, 20 bp, Unknown
  Description of Unknown: gRNA target site sequence
gagtcccagtccatcacgag

SEQ ID NO: 9159 - DNA, 20 bp, Unknown
  Description of Unknown: gRNA target site sequence
cccagtccatcacgagcagc

SEQ ID NO: 9160 - DNA, 20 bp, Unknown
  Description of Unknown: gRNA target site sequence
atcacgagcagctggtttct

SEQ ID NO: 9161 - DNA, 20 bp, Unknown
  Description of Unknown: gRNA target site sequence
aagatgctatttcccgtata

SEQ ID NO: 9162 - DNA, 20 bp, Unknown
  Description of Unknown: gRNA target site sequence
ctatttcccgtataaagcat

SEQ ID NO: 9163 - DNA, 20 bp, Unknown
  Description of Unknown: gRNA target site sequence
agcatgagaccgtgacttgc

SEQ ID NO: 9164 - DNA, 20 bp, Unknown
  Description of Unknown: gRNA target site sequence
accgtgacttgccagcccca

SEQ ID NO: 9165 - DNA, 20 bp, Unknown
  Description of Unknown: gRNA target site sequence
cgtgacttgccagccccaca

SEQ ID NO: 9166 - DNA, 20 bp, Unknown
  Description of Unknown: gRNA target site sequence
gccccgcccttgtccatcac

SEQ ID NO: 9167 - DNA, 20 bp, Unknown
  Description of Unknown: gRNA target site sequence
ccttgtccatcactggcatc

SEQ ID NO: 9168 - DNA, 20 bp, Unknown
  Description of Unknown: gRNA target site sequence
catcactggcatctggactc

SEQ ID NO: 9169 - DNA, 20 bp, Unknown
  Description of Unknown: gRNA target site sequence
ctggcatctggactccagcc

SEQ ID NO: 9170 - DNA, 20 bp, Unknown
  Description of Unknown: gRNA target site sequence
tggcatctggactccagcct

SEQ ID NO: 9171 - DNA, 20 bp, Unknown
  Description of Unknown: gRNA target site sequence
atctggactccagcctgggt

SEQ ID NO: 9172 - DNA, 20 bp, Unknown
  Description of Unknown: gRNA target site sequence
tctggactccagcctgggtt

SEQ ID NO: 9173 - DNA, 20 bp, Unknown
  Description of Unknown: gRNA target site sequence
ctggactccagcctgggttg

SEQ ID NO: 9174 - DNA, 20 bp, Unknown
  Description of Unknown: gRNA target site sequence
ctccagcctgggttggggca

SEQ ID NO: 9175 - DNA, 20 bp, Unknown
  Description of Unknown: gRNA target site sequence
ccagcctgggttggggcaaa

SEQ ID NO: 9176 - DNA, 20 bp, Unknown
  Description of Unknown: gRNA target site sequence
cagcctgggttggggcaaag

SEQ ID NO: 9177 - DNA, 20 bp, Unknown
  Description of Unknown: gRNA target site sequence
agcctgggttggggcaaaga

SEQ ID NO: 9178 - DNA, 20 bp, Unknown
  Description of Unknown: gRNA target site sequence
gttggggcaaagagggaaat

SEQ ID NO: 9179 - DNA, 20 bp, Unknown
  Description of Unknown: gRNA target site sequence
accctgatcctcttgtccca

SEQ ID NO: 9180 - DNA, 20 bp, Unknown
  Description of Unknown: gRNA target site sequence
cctcttgtcccacagatatc

SEQ ID NO: 9181 - DNA, 20 bp, Unknown
  Description of Unknown: gRNA target site sequence
accctgaccctgccgtgtac

SEQ ID NO: 9182 - DNA, 20 bp, Unknown
  Description of Unknown: gRNA target site sequence
gaccctgccgtgtaccagct

SEQ ID NO: 9183 - DNA, 20 bp, Unknown
  Description of Unknown: gRNA target site sequence
ccctgccgtgtaccagctga

SEQ ID NO: 9184 - DNA, 20 bp, Unknown
  Description of Unknown: gRNA target site sequence
cagctgagagactctaaatc

SEQ ID NO: 9185 - DNA, 20 bp, Unknown
  Description of Unknown: gRNA target site sequence
gagactctaaatccagtgac

SEQ ID NO: 9186 - DNA, 20 bp, Unknown
  Description of Unknown: gRNA target site sequence
tctcaaacaaatgtgtcaca

SEQ ID NO: 9187 - DNA, 20 bp, Unknown
  Description of Unknown: gRNA target site sequence
aaacaaatgtgtcacaaagt

SEQ ID NO: 9188 - DNA, 20 bp, Unknown
  Description of Unknown: gRNA target site sequence
aacaaatgtgtcacaaagta

SEQ ID NO: 9189 - DNA, 20 bp, Unknown
  Description of Unknown: gRNA target site sequence
ggattctgatgtgtatatca

SEQ ID NO: 9190 - DNA, 20 bp, Unknown
  Description of Unknown: gRNA target site sequence
tatcacagacaaaactgtgc

SEQ ID NO: 9191 - DNA, 20 bp, Unknown
  Description of Unknown: gRNA target site sequence
gacaaaactgtgctagacat

SEQ ID NO: 9192 - DNA, 20 bp, Unknown
  Description of Unknown: gRNA target site sequence
acaaaactgtgctagacatg

SEQ ID NO: 9193 - DNA, 20 bp, Unknown
  Description of Unknown: gRNA target site sequence
tgtgctagacatgaggtcta

SEQ ID NO: 9194 - DNA, 20 bp, Unknown
  Description of Unknown: gRNA target site sequence
acatgaggtctatggacttc

SEQ ID NO: 9195 - DNA, 20 bp, Unknown
  Description of Unknown: gRNA target site sequence
atgaggtctatggacttcaa

SEQ ID NO: 9196 - DNA, 20 bp, Unknown
  Description of Unknown: gRNA target site sequence
tctatggacttcaagagcaa

SEQ ID NO: 9197 - DNA, 20 bp, Unknown
  Description of Unknown: gRNA target site sequence
cttcaagagcaacagtgctg

SEQ ID NO: 9198 - DNA, 20 bp, Unknown
  Description of Unknown: gRNA target site sequence
agagcaacagtgctgtggcc

SEQ ID NO: 9199 - DNA, 20 bp, Unknown
  Description of Unknown: gRNA target site sequence
agcaacagtgctgtggcctg

SEQ ID NO: 9200 - DNA, 20 bp, Unknown
  Description of Unknown: gRNA target site sequence
tgtgcaaacgccttcaacaa

SEQ ID NO: 9201 - DNA, 20 bp, Unknown
  Description of Unknown: gRNA target site sequence
cttcaacaacagcattattc

SEQ ID NO: 9202 - DNA, 20 bp, Unknown
  Description of Unknown: gRNA target site sequence
caacaacagcattattccag

SEQ ID NO: 9203 - DNA, 20 bp, Unknown
  Description of Unknown: gRNA target site sequence
ccagaagacaccttcttccc

SEQ ID NO: 9204 - DNA, 20 bp, Unknown
  Description of Unknown: gRNA target site sequence
agacaccttcttccccagcc

SEQ ID NO: 9205 - DNA, 20 bp, Unknown
  Description of Unknown: gRNA target site sequence
gacaccttcttccccagccc

SEQ ID NO: 9206 - DNA, 20 bp, Unknown
  Description of Unknown: gRNA target site sequence
ccttcttccccagcccaggt

SEQ ID NO: 9207 - DNA, 20 bp, Unknown
  Description of Unknown: gRNA target site sequence
cttcttccccagcccaggta

SEQ ID NO: 9208 - DNA, 20 bp, Unknown
  Description of Unknown: gRNA target site sequence
ttcttccccagcccaggtaa

SEQ ID NO: 9209 - DNA, 20 bp, Unknown
  Description of Unknown: gRNA target site sequence
ttccccagcccaggtaaggg

SEQ ID NO: 9210 - DNA, 20 bp, Unknown
  Description of Unknown: gRNA target site sequence
agcccaggtaagggcagctt

SEQ ID NO: 9211 - DNA, 20 bp, Unknown
  Description of Unknown: gRNA target site sequence
gggcagctttggtgccttcg

SEQ ID NO: 9212 - DNA, 20 bp, Unknown
  Description of Unknown: gRNA target site sequence
ggcagctttggtgccttcgc

SEQ ID NO: 9213 - DNA, 20 bp, Unknown
  Description of Unknown: gRNA target site sequence
cgcaggctgtttccttgctt

SEQ ID NO: 9214 - DNA, 20 bp, Unknown
  Description of Unknown: gRNA target site sequence
gcaggctgtttccttgcttc

SEQ ID NO: 9215 - DNA, 20 bp, Unknown
  Description of Unknown: gRNA target site sequence
ctgtttccttgcttcaggaa

SEQ ID NO: 9216 - DNA, 20 bp, Unknown
  Description of Unknown: gRNA target site sequence
ttccttgcttcaggaatggc

SEQ ID NO: 9217 - DNA, 20 bp, Unknown
  Description of Unknown: gRNA target site sequence
tccttgcttcaggaatggcc

SEQ ID NO: 9218 - DNA, 20 bp, Unknown
  Description of Unknown: gRNA target site sequence
aggaatggccaggttctgcc

SEQ ID NO: 9219 - DNA, 20 bp, Unknown
  Description of Unknown: gRNA target site sequence
gaatggccaggttctgccca

SEQ ID NO: 9220 - DNA, 20 bp, Unknown
  Description of Unknown: gRNA target site sequence
ccaggttctgcccagagctc

SEQ ID NO: 9221 - DNA, 20 bp, Unknown
  Description of Unknown: gRNA target site sequence
atgtctaaaactcctctgat

SEQ ID NO: 9222 - DNA, 20 bp, Unknown
  Description of Unknown: gRNA target site sequence
tctaaaactcctctgattgg

SEQ ID NO: 9223 - DNA, 20 bp, Unknown
  Description of Unknown: gRNA target site sequence
actcctctgattggtggtct

SEQ ID NO: 9224 - DNA, 20 bp, Unknown
  Description of Unknown: gRNA target site sequence
accaaaaccctctttttact

SEQ ID NO: 9225 - DNA, 20 bp, Unknown
  Description of Unknown: gRNA target site sequence
accctctttttactaagaaa

SEQ ID NO: 9226 - DNA, 20 bp, Unknown
  Description of Unknown: gRNA target site sequence
tctttttactaagaaacagt

SEQ ID NO: 9227 - DNA, 20 bp, Unknown
  Description of Unknown: gRNA target site sequence
agaaacagtgagccttgttc

SEQ ID NO: 9228 - DNA, 20 bp, Unknown
  Description of Unknown: gRNA target site sequence
aacagtgagccttgttctgg

SEQ ID NO: 9229 - DNA, 20 bp, Unknown
  Description of Unknown: gRNA target site sequence
tgagccttgttctggcagtc

SEQ ID NO: 9230 - DNA, 20 bp, Unknown
  Description of Unknown: gRNA target site sequence
agccttgttctggcagtcca

SEQ ID NO: 9231 - DNA, 20 bp, Unknown
  Description of Unknown: gRNA target site sequence
tggcagtccagagaatgaca

SEQ ID NO: 9232 - DNA, 20 bp, Unknown
  Description of Unknown: gRNA target site sequence
ggcagtccagagaatgacac

SEQ ID NO: 9233 - DNA, 20 bp, Unknown
  Description of Unknown: gRNA target site sequence
cagagaatgacacgggaaaa

SEQ ID NO: 9234 - DNA, 20 bp, Unknown
  Description of Unknown: gRNA target site sequence
agaatgacacgggaaaaaag

SEQ ID NO: 9235 - DNA, 20 bp, Unknown
  Description of Unknown: gRNA target site sequence
acacgggaaaaaagcagatg

SEQ ID NO: 9236 - DNA, 20 bp, Unknown
  Description of Unknown: gRNA target site sequence
acgggaaaaaagcagatgaa

SEQ ID NO: 9237 - DNA, 20 bp, Unknown
  Description of Unknown: gRNA target site sequence
ggaaaaaagcagatgaagag

SEQ ID NO: 9238 - DNA, 20 bp, Unknown
  Description of Unknown: gRNA target site sequence
gaaaaaagcagatgaagaga

SEQ ID NO: 9239 - DNA, 20 bp, Unknown
  Description of Unknown: gRNA target site sequence
aaaagcagatgaagagaagg

SEQ ID NO: 9240 - DNA, 20 bp, Unknown
  Description of Unknown: gRNA target site sequence
agcagatgaagagaaggtgg

SEQ ID NO: 9241 - DNA, 20 bp, Unknown
  Description of Unknown: gRNA target site sequence
gcagatgaagagaaggtggc

SEQ ID NO: 9242 - DNA, 20 bp, Unknown
  Description of Unknown: gRNA target site sequence
agatgaagagaaggtggcag

SEQ ID NO: 9243 - DNA, 20 bp, Unknown
  Description of Unknown: gRNA target site sequence
atgaagagaaggtggcagga

SEQ ID NO: 9244 - DNA, 20 bp, Unknown
  Description of Unknown: gRNA target site sequence
tgaagagaaggtggcaggag

SEQ ID NO: 9245 - DNA, 20 bp, Unknown
  Description of Unknown: gRNA target site sequence
gaagagaaggtggcaggaga

SEQ ID NO: 9246 - DNA, 20 bp, Unknown
  Description of Unknown: gRNA target site sequence
aggtggcaggagagggcacg

SEQ ID NO: 9247 - DNA, 20 bp, Unknown
  Description of Unknown: gRNA target site sequence
gcaggagagggcacgtggcc

SEQ ID NO: 9248 - DNA, 20 bp, Unknown
  Description of Unknown: gRNA target site sequence
gagggcacgtggcccagcct

SEQ ID NO: 9249 - DNA, 20 bp, Unknown
  Description of Unknown: gRNA target site sequence
cagcctcagtctctccaact

SEQ ID NO: 9250 - DNA, 20 bp, Unknown
  Description of Unknown: gRNA target site sequence
cctgcctgcctgcctttgct

SEQ ID NO: 9251 - DNA, 20 bp, Unknown
  Description of Unknown: gRNA target site sequence
tttgccccttactgctcttc

SEQ ID NO: 9252 - DNA, 20 bp, Unknown
  Description of Unknown: gRNA target site sequence
ttgccccttactgctcttct

SEQ ID NO: 9253 - DNA, 20 bp, Unknown
  Description of Unknown: gRNA target site sequence
gctcttctaggcctcattct

SEQ ID NO: 9254 - DNA, 20 bp, Unknown
  Description of Unknown: gRNA target site sequence
tcattctaagccccttctcc

SEQ ID NO: 9255 - DNA, 20 bp, Unknown
  Description of Unknown: gRNA target site sequence
gtctgccaaaaaatctttcc

SEQ ID NO: 9256 - DNA, 20 bp, Unknown
  Description of Unknown: gRNA target site sequence
aaaatctttcccagctcact

SEQ ID NO: 9257 - DNA, 20 bp, Unknown
  Description of Unknown: gRNA target site sequence
tctttcccagctcactaagt

SEQ ID NO: 9258 - DNA, 20 bp, Unknown
  Description of Unknown: gRNA target site sequence
ctcactaagtcagtctcacg

SEQ ID NO: 9259 - DNA, 20 bp, Unknown
  Description of Unknown: gRNA target site sequence
ccaccaatcactgattgtgc

SEQ ID NO: 9260 - DNA, 20 bp, Unknown
  Description of Unknown: gRNA target site sequence
gtgccggcacatgaatgcac

SEQ ID NO: 9261 - DNA, 20 bp, Unknown
  Description of Unknown: gRNA target site sequence
tgccggcacatgaatgcacc

SEQ ID NO: 9262 - DNA, 20 bp, Unknown
  Description of Unknown: gRNA target site sequence
catgaatgcaccaggtgttg

SEQ ID NO: 9263 - DNA, 20 bp, Unknown
  Description of Unknown: gRNA target site sequence
gaatgcaccaggtgttgaag

SEQ ID NO: 9264 - DNA, 20 bp, Unknown
  Description of Unknown: gRNA target site sequence
atgcaccaggtgttgaagtg

SEQ ID NO: 9265 - DNA, 20 bp, Unknown
  Description of Unknown: gRNA target site sequence
tgcaccaggtgttgaagtgg

SEQ ID NO: 9266 - DNA, 20 bp, Unknown
  Description of Unknown: gRNA target site sequence
gttgaagtggaggaattaaa

SEQ ID NO: 9267 - DNA, 20 bp, Unknown
  Description of Unknown: gRNA target site sequence
aagtggaggaattaaaaagt

SEQ ID NO: 9268 - DNA, 20 bp, Unknown
  Description of Unknown: gRNA target site sequence
gaggaattaaaaagtcagat

SEQ ID NO: 9269 - DNA, 20 bp, Unknown
  Description of Unknown: gRNA target site sequence
aggaattaaaaagtcagatg

SEQ ID NO: 9270 - DNA, 20 bp, Unknown
  Description of Unknown: gRNA target site sequence
ggaattaaaaagtcagatga

SEQ ID NO: 9271 - DNA, 20 bp, Unknown
  Description of Unknown: gRNA target site sequence
gaattaaaaagtcagatgag

SEQ ID NO: 9272 - DNA, 20 bp, Unknown
  Description of Unknown: gRNA target site sequence
agtcagatgaggggtgtgcc

SEQ ID NO: 9273 - DNA, 20 bp, Unknown
  Description of Unknown: gRNA target site sequence
tcagatgaggggtgtgccca

SEQ ID NO: 9274 - DNA, 20 bp, Unknown
  Description of Unknown: gRNA target site sequence
cagatgaggggtgtgcccag

SEQ ID NO: 9275 - DNA, 20 bp, Unknown
  Description of Unknown: gRNA target site sequence
atgaggggtgtgcccagagg

SEQ ID NO: 9276 - DNA, 20 bp, Unknown
  Description of Unknown: gRNA target site sequence
gcccagaggaagcaccattc

SEQ ID NO: 9277 - DNA, 20 bp, Unknown
  Description of Unknown: gRNA target site sequence
agaggaagcaccattctagt

SEQ ID NO: 9278 - DNA, 20 bp, Unknown
  Description of Unknown: gRNA target site sequence
gaggaagcaccattctagtt

SEQ ID NO: 9279 - DNA, 20 bp, Unknown
  Description of Unknown: gRNA target site sequence
aggaagcaccattctagttg

SEQ ID NO: 9280 - DNA, 20 bp, Unknown
  Description of Unknown: gRNA target site sequence
ggaagcaccattctagttgg

SEQ ID NO: 9281 - DNA, 20 bp, Unknown
  Description of Unknown: gRNA target site sequence
aagcaccattctagttgggg

SEQ ID NO: 9282 - DNA, 20 bp, Unknown
  Description of Unknown: gRNA target site sequence
agttgggggagcccatctgt

SEQ ID NO: 9283 - DNA, 20 bp, Unknown
  Description of Unknown: gRNA target site sequence
gggggagcccatctgtcagc

SEQ ID NO: 9284 - DNA, 20 bp, Unknown
  Description of Unknown: gRNA target site sequence
ggggagcccatctgtcagct

SEQ ID NO: 9285 - DNA, 20 bp, Unknown
  Description of Unknown: gRNA target site sequence
gcccatctgtcagctgggaa

SEQ ID NO: 9286 - DNA, 20 bp, Unknown
  Description of Unknown: gRNA target site sequence
gggaaaagtccaaataactt

SEQ ID NO: 9287 - DNA, 20 bp, Unknown
  Description of Unknown: gRNA target site sequence
aagtccaaataacttcagat

SEQ ID NO: 9288 - DNA, 20 bp, Unknown
  Description of Unknown: gRNA target site sequence
gattggaatgtgttttaact

SEQ ID NO: 9289 - DNA, 20 bp, Unknown
  Description of Unknown: gRNA target site sequence
attggaatgtgttttaactc

SEQ ID NO: 9290 - DNA, 20 bp, Unknown
  Description of Unknown: gRNA target site sequence
ttggaatgtgttttaactca

SEQ ID NO: 9291 - DNA, 20 bp, Unknown
  Description of Unknown: gRNA target site sequence
atgtgttttaactcagggtt

SEQ ID NO: 9292 - DNA, 20 bp, Unknown
  Description of Unknown: gRNA target site sequence
ttaactcagggttgagaaaa

SEQ ID NO: 9293 - DNA, 20 bp, Unknown
  Description of Unknown: gRNA target site sequence
gttgagaaaacagccacctt

SEQ ID NO: 9294 - DNA, 20 bp, Unknown
  Description of Unknown: gRNA target site sequence
ttgagaaaacagccaccttc

SEQ ID NO: 9295 - DNA, 20 bp, Unknown
  Description of Unknown: gRNA target site sequence
aacagccaccttcaggacaa

SEQ ID NO: 9296 - DNA, 20 bp, Unknown
  Description of Unknown: gRNA target site sequence
gccaccttcaggacaaaagt

SEQ ID NO: 9297 - DNA, 20 bp, Unknown
  Description of Unknown: gRNA target site sequence
gtggctgttttctcaaccct

SEQ ID NO: 9298 - DNA, 20 bp, Unknown
  Description of Unknown: gRNA target site sequence
ttaaaacacattccaatctg

SEQ ID NO: 9299 - DNA, 20 bp, Unknown
  Description of Unknown: gRNA target site sequence
cattccaatctgaagttatt

SEQ ID NO: 9300 - DNA, 20 bp, Unknown
  Description of Unknown: gRNA target site sequence
gaagttatttggacttttcc

SEQ ID NO: 9301 - DNA, 20 bp, Unknown
  Description of Unknown: gRNA target site sequence
tttggacttttcccagctga

SEQ ID NO: 9302 - DNA, 20 bp, Unknown
  Description of Unknown: gRNA target site sequence
gacttttcccagctgacaga

SEQ ID NO: 9303 - DNA, 20 bp, Unknown
  Description of Unknown: gRNA target site sequence
acttttcccagctgacagat

SEQ ID NO: 9304 - DNA, 20 bp, Unknown
  Description of Unknown: gRNA target site sequence
gacagatgggctcccccaac

SEQ ID NO: 9305 - DNA, 20 bp, Unknown
  Description of Unknown: gRNA target site sequence
atgggctcccccaactagaa

SEQ ID NO: 9306 - DNA, 20 bp, Unknown
  Description of Unknown: gRNA target site sequence
aactagaatggtgcttcctc

SEQ ID NO: 9307 - DNA, 20 bp, Unknown
  Description of Unknown: gRNA target site sequence
actagaatggtgcttcctct

SEQ ID NO: 9308 - DNA, 20 bp, Unknown
  Description of Unknown: gRNA target site sequence
aattcctccacttcaacacc

SEQ ID NO: 9309 - DNA, 20 bp, Unknown
  Description of Unknown: gRNA target site sequence
cacctggtgcattcatgtgc

SEQ ID NO: 9310 - DNA, 20 bp, Unknown
  Description of Unknown: gRNA target site sequence
cattcatgtgccggcacaat

SEQ ID NO: 9311 - DNA, 20 bp, Unknown
  Description of Unknown: gRNA target site sequence
gtgccggcacaatcagtgat

SEQ ID NO: 9312 - DNA, 20 bp, Unknown
  Description of Unknown: gRNA target site sequence
ccggcacaatcagtgattgg

SEQ ID NO: 9313 - DNA, 20 bp, Unknown
  Description of Unknown: gRNA target site sequence
cggcacaatcagtgattggt

SEQ ID NO: 9314 - DNA, 20 bp, Unknown
  Description of Unknown: gRNA target site sequence
tcagtgattggtgggttaat

SEQ ID NO: 9315 - DNA, 20 bp, Unknown
  Description of Unknown: gRNA target site sequence
gggttaatgagtgactgcgt

SEQ ID NO: 9316 - DNA, 20 bp, Unknown
  Description of Unknown: gRNA target site sequence
gtgactgcgtgagactgact

SEQ ID NO: 9317 - DNA, 20 bp, Unknown
  Description of Unknown: gRNA target site sequence
ctgcgtgagactgacttagt

SEQ ID NO: 9318 - DNA, 20 bp, Unknown
  Description of Unknown: gRNA target site sequence
gtgagactgacttagtgagc

SEQ ID NO: 9319 - DNA, 20 bp, Unknown
  Description of Unknown: gRNA target site sequence
tgagactgacttagtgagct

SEQ ID NO: 9320 - DNA, 20 bp, Unknown
  Description of Unknown: gRNA target site sequence
actgacttagtgagctggga

SEQ ID NO: 9321 - DNA, 20 bp, Unknown
  Description of Unknown: gRNA target site sequence
gtgagctgggaaagattttt

SEQ ID NO: 9322 - DNA, 20 bp, Unknown
  Description of Unknown: gRNA target site sequence
agctgggaaagattttttgg

SEQ ID NO: 9323 - DNA, 20 bp, Unknown
  Description of Unknown: gRNA target site sequence
gggaaagattttttggcaga

SEQ ID NO: 9324 - DNA, 20 bp, Unknown
  Description of Unknown: gRNA target site sequence
ggaaagattttttggcagac

SEQ ID NO: 9325 - DNA, 20 bp, Unknown
  Description of Unknown: gRNA target site sequence
gaaagattttttggcagaca

SEQ ID NO: 9326 - DNA, 20 bp, Unknown
  Description of Unknown: gRNA target site sequence
aagattttttggcagacagg

SEQ ID NO: 9327 - DNA, 20 bp, Unknown
  Description of Unknown: gRNA target site sequence
tttggcagacagggagaaat

SEQ ID NO: 9328 - DNA, 20 bp, Unknown
  Description of Unknown: gRNA target site sequence
ttggcagacagggagaaata

SEQ ID NO: 9329 - DNA, 20 bp, Unknown
  Description of Unknown: gRNA target site sequence
ggcagacagggagaaataag

SEQ ID NO: 9330 - DNA, 20 bp, Unknown
  Description of Unknown: gRNA target site sequence
cagacagggagaaataagga

SEQ ID NO: 9331 - DNA, 20 bp, Unknown
  Description of Unknown: gRNA target site sequence
agacagggagaaataaggag

SEQ ID NO: 9332 - DNA, 20 bp, Unknown
  Description of Unknown: gRNA target site sequence
agaaataaggagaggcaact

SEQ ID NO: 9333 - DNA, 20 bp, Unknown
  Description of Unknown: gRNA target site sequence
aaataaggagaggcaacttg

SEQ ID NO: 9334 - DNA, 20 bp, Unknown
  Description of Unknown: gRNA target site sequence
taaggagaggcaacttggag

SEQ ID NO: 9335 - DNA, 20 bp, Unknown
  Description of Unknown: gRNA target site sequence
aaggagaggcaacttggaga

SEQ ID NO: 9336 - DNA, 20 bp, Unknown
  Description of Unknown: gRNA target site sequence
aggagaggcaacttggagaa

SEQ ID NO: 9337 - DNA, 20 bp, Unknown
  Description of Unknown: gRNA target site sequence
ggagaggcaacttggagaag

SEQ ID NO: 9338 - DNA, 20 bp, Unknown
  Description of Unknown: gRNA target site sequence
ggcaacttggagaaggggct

SEQ ID NO: 9339 - DNA, 20 bp, Unknown
  Description of Unknown: gRNA target site sequence
ttggagaaggggcttagaat

SEQ ID NO: 9340 - DNA, 20 bp, Unknown
  Description of Unknown: gRNA target site sequence
tggagaaggggcttagaatg

SEQ ID NO: 9341 - DNA, 20 bp, Unknown
  Description of Unknown: gRNA target site sequence
aaggggcttagaatgaggcc

SEQ ID NO: 9342 - DNA, 20 bp, Unknown
  Description of Unknown: gRNA target site sequence
gggcttagaatgaggcctag

SEQ ID NO: 9343 - DNA, 20 bp, Unknown
  Description of Unknown: gRNA target site sequence
gcttagaatgaggcctagaa

SEQ ID NO: 9344 - DNA, 20 bp, Unknown
  Description of Unknown: gRNA target site sequence
tagaatgaggcctagaagag

SEQ ID NO: 9345 - DNA, 20 bp, Unknown
  Description of Unknown: gRNA target site sequence
atgaggcctagaagagcagt

SEQ ID NO: 9346 - DNA, 20 bp, Unknown
  Description of Unknown: gRNA target site sequence
tgaggcctagaagagcagta

SEQ ID NO: 9347 - DNA, 20 bp, Unknown
  Description of Unknown: gRNA target site sequence
gaggcctagaagagcagtaa

SEQ ID NO: 9348 - DNA, 20 bp, Unknown
  Description of Unknown: gRNA target site sequence
aggcctagaagagcagtaag

SEQ ID NO: 9349 - DNA, 20 bp, Unknown
  Description of Unknown: gRNA target site sequence
gaagagcagtaaggggcaaa

SEQ ID NO: 9350 - DNA, 20 bp, Unknown
  Description of Unknown: gRNA target site sequence
cagtaaggggcaaacagtct

SEQ ID NO: 9351 - DNA, 20 bp, Unknown
  Description of Unknown: gRNA target site sequence
aggggcaaacagtctgagca

SEQ ID NO: 9352 - DNA, 20 bp, Unknown
  Description of Unknown: gRNA target site sequence
ggggcaaacagtctgagcaa

SEQ ID NO: 9353 - DNA, 20 bp, Unknown
  Description of Unknown: gRNA target site sequence
gcaaacagtctgagcaaagg

SEQ ID NO: 9354 - DNA, 20 bp, Unknown
  Description of Unknown: gRNA target site sequence
caaacagtctgagcaaaggc

SEQ ID NO: 9355 - DNA, 20 bp, Unknown
  Description of Unknown: gRNA target site sequence
acagtctgagcaaaggcagg

SEQ ID NO: 9356 - DNA, 20 bp, Unknown
  Description of Unknown: gRNA target site sequence
cagtctgagcaaaggcaggc

SEQ ID NO: 9357 - DNA, 20 bp, Unknown
  Description of Unknown: gRNA target site sequence
tctgagcaaaggcaggcagg

SEQ ID NO: 9358 - DNA, 20 bp, Unknown
  Description of Unknown: gRNA target site sequence
ctgagcaaaggcaggcaggc

SEQ ID NO: 9359 - DNA, 20 bp, Unknown
  Description of Unknown: gRNA target site sequence
aaggcaggcaggcaggaact

SEQ ID NO: 9360 - DNA, 20 bp, Unknown
  Description of Unknown: gRNA target site sequence
caggcaggcaggaactcagt

SEQ ID NO: 9361 - DNA, 20 bp, Unknown
  Description of Unknown: gRNA target site sequence
ggcaggcaggaactcagttg

SEQ ID NO: 9362 - DNA, 20 bp, Unknown
  Description of Unknown: gRNA target site sequence
caggcaggaactcagttgga

SEQ ID NO: 9363 - DNA, 20 bp, Unknown
  Description of Unknown: gRNA target site sequence
ggaactcagttggagagact

SEQ ID NO: 9364 - DNA, 20 bp, Unknown
  Description of Unknown: gRNA target site sequence
gaactcagttggagagactg

SEQ ID NO: 9365 - DNA, 20 bp, Unknown
  Description of Unknown: gRNA target site sequence
tcagttggagagactgaggc

SEQ ID NO: 9366 - DNA, 20 bp, Unknown
  Description of Unknown: gRNA target site sequence
cagttggagagactgaggct

SEQ ID NO: 9367 - DNA, 20 bp, Unknown
  Description of Unknown: gRNA target site sequence
ttttttcccgtgtcattctc

SEQ ID NO: 9368 - DNA, 20 bp, Unknown
  Description of Unknown: gRNA target site sequence
cgtgtcattctctggactgc

SEQ ID NO: 9369 - DNA, 20 bp, Unknown
  Description of Unknown: gRNA target site sequence
attctctggactgccagaac

SEQ ID NO: 9370 - DNA, 20 bp, Unknown
  Description of Unknown: gRNA target site sequence
ttctctggactgccagaaca

SEQ ID NO: 9371 - DNA, 20 bp, Unknown
  Description of Unknown: gRNA target site sequence
gaacaaggctcactgtttct

SEQ ID NO: 9372 - DNA, 20 bp, Unknown
  Description of Unknown: gRNA target site sequence
gctcactgtttcttagtaaa

SEQ ID NO: 9373 - DNA, 20 bp, Unknown
  Description of Unknown: gRNA target site sequence
tcactgtttcttagtaaaaa

SEQ ID NO: 9374 - DNA, 20 bp, Unknown
  Description of Unknown: gRNA target site sequence
cactgtttcttagtaaaaag

SEQ ID NO: 9375 - DNA, 20 bp, Unknown
  Description of Unknown: gRNA target site sequence
actgtttcttagtaaaaaga

SEQ ID NO: 9376 - DNA, 20 bp, Unknown
  Description of Unknown: gRNA target site sequence
tcttagtaaaaagagggttt

SEQ ID NO: 9377 - DNA, 20 bp, Unknown
  Description of Unknown: gRNA target site sequence
tagtaaaaagagggttttgg

SEQ ID NO: 9378 - DNA, 20 bp, Unknown
  Description of Unknown: gRNA target site sequence
aaagagggttttggtggcaa

SEQ ID NO: 9379 - DNA, 20 bp, Unknown
  Description of Unknown: gRNA target site sequence
gggttttggtggcaatggat

SEQ ID NO: 9380 - DNA, 20 bp, Unknown
  Description of Unknown: gRNA target site sequence
ggttttggtggcaatggata

SEQ ID NO: 9381 - DNA, 20 bp, Unknown
  Description of Unknown: gRNA target site sequence
tggtggcaatggataaggcc

SEQ ID NO: 9382 - DNA, 20 bp, Unknown
  Description of Unknown: gRNA target site sequence
ataaggccgagaccaccaat

SEQ ID NO: 9383 - DNA, 20 bp, Unknown
  Description of Unknown: gRNA target site sequence
aaggccgagaccaccaatca

SEQ ID NO: 9384 - DNA, 20 bp, Unknown
  Description of Unknown: gRNA target site sequence
aggccgagaccaccaatcag

SEQ ID NO: 9385 - DNA, 20 bp, Unknown
  Description of Unknown: gRNA target site sequence
gccgagaccaccaatcagag

SEQ ID NO: 9386 - DNA, 20 bp, Unknown
  Description of Unknown: gRNA target site sequence
accaccaatcagaggagttt

SEQ ID NO: 9387 - DNA, 20 bp, Unknown
  Description of Unknown: gRNA target site sequence
gagttttagacatcattgac

SEQ ID NO: 9388 - DNA, 20 bp, Unknown
  Description of Unknown: gRNA target site sequence
gttttagacatcattgacca

SEQ ID NO: 9389 - DNA, 20 bp, Unknown
  Description of Unknown: gRNA target site sequence
gacatcattgaccagagctc

SEQ ID NO: 9390 - DNA, 20 bp, Unknown
  Description of Unknown: gRNA target site sequence
acatcattgaccagagctct

SEQ ID NO: 9391 - DNA, 20 bp, Unknown
  Description of Unknown: gRNA target site sequence
tcattgaccagagctctggg

SEQ ID NO: 9392 - DNA, 20 bp, Unknown
  Description of Unknown: gRNA target site sequence
ccagagctctgggcagaacc

SEQ ID NO: 9393 - DNA, 20 bp, Unknown
  Description of Unknown: gRNA target site sequence
gcagaacctggccattcctg

SEQ ID NO: 9394 - DNA, 20 bp, Unknown
  Description of Unknown: gRNA target site sequence
aacctggccattcctgaagc

SEQ ID NO: 9395 - DNA, 20 bp, Unknown
  Description of Unknown: gRNA target site sequence
acctggccattcctgaagca

SEQ ID NO: 9396 - DNA, 20 bp, Unknown
  Description of Unknown: gRNA target site sequence
ccattcctgaagcaaggaaa

SEQ ID NO: 9397 - DNA, 20 bp, Unknown
  Description of Unknown: gRNA target site sequence
aagcaaggaaacagcctgcg

SEQ ID NO: 9398 - DNA, 20 bp, Unknown
  Description of Unknown: gRNA target site sequence
agcaaggaaacagcctgcga

SEQ ID NO: 9399 - DNA, 20 bp, Unknown
  Description of Unknown: gRNA target site sequence
aacagcctgcgaaggcacca

SEQ ID NO: 9400 - DNA, 20 bp, Unknown
  Description of Unknown: gRNA target site sequence
gcaccaaagctgcccttacc

SEQ ID NO: 9401 - DNA, 20 bp, Unknown
  Description of Unknown: gRNA target site sequence
caccaaagctgcccttacct

SEQ ID NO: 9402 - DNA, 20 bp, Unknown
  Description of Unknown: gRNA target site sequence
aaagctgcccttacctgggc

SEQ ID NO: 9403 - DNA, 20 bp, Unknown
  Description of Unknown: gRNA target site sequence
aagctgcccttacctgggct

SEQ ID NO: 9404 - DNA, 20 bp, Unknown
  Description of Unknown: gRNA target site sequence
agctgcccttacctgggctg

SEQ ID NO: 9405 - DNA, 20 bp, Unknown
  Description of Unknown: gRNA target site sequence
tgcccttacctgggctgggg

SEQ ID NO: 9406 - DNA, 20 bp, Unknown
  Description of Unknown: gRNA target site sequence
ccttacctgggctggggaag

SEQ ID NO: 9407 - DNA, 20 bp, Unknown
  Description of Unknown: gRNA target site sequence
cttacctgggctggggaaga

SEQ ID NO: 9408 - DNA, 20 bp, Unknown
  Description of Unknown: gRNA target site sequence
ctggggaagaaggtgtcttc

SEQ ID NO: 9409 - DNA, 20 bp, Unknown
  Description of Unknown: gRNA target site sequence
ctggaataatgctgttgttg

SEQ ID NO: 9410 - DNA, 20 bp, Unknown
  Description of Unknown: gRNA target site sequence
tggaataatgctgttgttga

SEQ ID NO: 9411 - DNA, 20 bp, Unknown
  Description of Unknown: gRNA target site sequence
tgaaggcgtttgcacatgca

SEQ ID NO: 9412 - DNA, 20 bp, Unknown
  Description of Unknown: gRNA target site sequence
ggcgtttgcacatgcaaagt

SEQ ID NO: 9413 - DNA, 20 bp, Unknown
  Description of Unknown: gRNA target site sequence
caaagtcagatttgttgctc

SEQ ID NO: 9414 - DNA, 20 bp, Unknown
  Description of Unknown: gRNA target site sequence
aaagtcagatttgttgctcc

SEQ ID NO: 9415 - DNA, 20 bp, Unknown
  Description of Unknown: gRNA target site sequence
agatttgttgctccaggcca

SEQ ID NO: 9416 - DNA, 20 bp, Unknown
  Description of Unknown: gRNA target site sequence
ccacagcactgttgctcttg

SEQ ID NO: 9417 - DNA, 20 bp, Unknown
  Description of Unknown: gRNA target site sequence
actgttgctcttgaagtcca

SEQ ID NO: 9418 - DNA, 20 bp, Unknown
  Description of Unknown: gRNA target site sequence
aagtccatagacctcatgtc

SEQ ID NO: 9419 - DNA, 20 bp, Unknown
  Description of Unknown: gRNA target site sequence
catagacctcatgtctagca

SEQ ID NO: 9420 - DNA, 20 bp, Unknown
  Description of Unknown: gRNA target site sequence
tttgtctgtgatatacacat

SEQ ID NO: 9421 - DNA, 20 bp, Unknown
  Description of Unknown: gRNA target site sequence
actttgtgacacatttgttt

SEQ ID NO: 9422 - DNA, 20 bp, Unknown
  Description of Unknown: gRNA target site sequence
atttgtttgagaatcaaaat

SEQ ID NO: 9423 - DNA, 20 bp, Unknown
  Description of Unknown: gRNA target site sequence
tgagaatcaaaatcggtgaa

SEQ ID NO: 9424 - DNA, 20 bp, Unknown
  Description of Unknown: gRNA target site sequence
gagaatcaaaatcggtgaat

SEQ ID NO: 9425 - DNA, 20 bp, Unknown
  Description of Unknown: gRNA target site sequence
aatcaaaatcggtgaatagg

SEQ ID NO: 9426 - DNA, 20 bp, Unknown
  Description of Unknown: gRNA target site sequence
aaaatcggtgaataggcaga

SEQ ID NO: 9427 - DNA, 20 bp, Unknown
  Description of Unknown: gRNA target site sequence
taggcagacagacttgtcac

SEQ ID NO: 9428 - DNA, 20 bp, Unknown
  Description of Unknown: gRNA target site sequence
gacagacttgtcactggatt

SEQ ID NO: 9429 - DNA, 20 bp, Unknown
  Description of Unknown: gRNA target site sequence
cagacttgtcactggattta

SEQ ID NO: 9430 - DNA, 20 bp, Unknown
  Description of Unknown: gRNA target site sequence
tcactggatttagagtctct

SEQ ID NO: 9431 - DNA, 20 bp, Unknown
  Description of Unknown: gRNA target site sequence
tggatttagagtctctcagc

SEQ ID NO: 9432 - DNA, 20 bp, Unknown
  Description of Unknown: gRNA target site sequence
agagtctctcagctggtaca

SEQ ID NO: 9433 - DNA, 20 bp, Unknown
  Description of Unknown: gRNA target site sequence
gtctctcagctggtacacgg

SEQ ID NO: 9434 - DNA, 20 bp, Unknown
  Description of Unknown: gRNA target site sequence
tctctcagctggtacacggc

SEQ ID NO: 9435 - DNA, 20 bp, Unknown
  Description of Unknown: gRNA target site sequence
ctctcagctggtacacggca

SEQ ID NO: 9436 - DNA, 20 bp, Unknown
  Description of Unknown: gRNA target site sequence
cagctggtacacggcagggt

SEQ ID NO: 9437 - DNA, 20 bp, Unknown
  Description of Unknown: gRNA target site sequence
agctggtacacggcagggtc

SEQ ID NO: 9438 - DNA, 20 bp, Unknown
  Description of Unknown: gRNA target site sequence
gctggtacacggcagggtca

SEQ ID NO: 9439 - DNA, 20 bp, Unknown
  Description of Unknown: gRNA target site sequence
acacggcagggtcagggttc

SEQ ID NO: 9440 - DNA, 20 bp, Unknown
  Description of Unknown: gRNA target site sequence
gtcagggttctggatatctg

SEQ ID NO: 9441 - DNA, 20 bp, Unknown
  Description of Unknown: gRNA target site sequence
tcagggttctggatatctgt

SEQ ID NO: 9442 - DNA, 20 bp, Unknown
  Description of Unknown: gRNA target site sequence
gttctggatatctgtgggac

SEQ ID NO: 9443 - DNA, 20 bp, Unknown
  Description of Unknown: gRNA target site sequence
tctggatatctgtgggacaa

SEQ ID NO: 9444 - DNA, 20 bp, Unknown
  Description of Unknown: gRNA target site sequence
ctggatatctgtgggacaag

SEQ ID NO: 9445 - DNA, 20 bp, Unknown
  Description of Unknown: gRNA target site sequence
tatctgtgggacaagaggat

SEQ ID NO: 9446 - DNA, 20 bp, Unknown
  Description of Unknown: gRNA target site sequence
atctgtgggacaagaggatc

SEQ ID NO: 9447 - DNA, 20 bp, Unknown
  Description of Unknown: gRNA target site sequence
tctgtgggacaagaggatca

SEQ ID NO: 9448 - DNA, 20 bp, Unknown
  Description of Unknown: gRNA target site sequence
tgggacaagaggatcagggt

SEQ ID NO: 9449 - DNA, 20 bp, Unknown
  Description of Unknown: gRNA target site sequence
gggacaagaggatcagggtt

SEQ ID NO: 9450 - DNA, 20 bp, Unknown
  Description of Unknown: gRNA target site sequence
tttccctctttgccccaacc

SEQ ID NO: 9451 - DNA, 20 bp, Unknown
  Description of Unknown: gRNA target site sequence
ttccctctttgccccaaccc

SEQ ID NO: 9452 - DNA, 20 bp, Unknown
  Description of Unknown: gRNA target site sequence
ctctttgccccaacccaggc

SEQ ID NO: 9453 - DNA, 20 bp, Unknown
  Description of Unknown: gRNA target site sequence
ctttgccccaacccaggctg

SEQ ID NO: 9454 - DNA, 20 bp, Unknown
  Description of Unknown: gRNA target site sequence
ccccaacccaggctggagtc

SEQ ID NO: 9455 - DNA, 20 bp, Unknown
  Description of Unknown: gRNA target site sequence
ccaggctggagtccagatgc

SEQ ID NO: 9456 - DNA, 20 bp, Unknown
  Description of Unknown: gRNA target site sequence
tggagtccagatgccagtga

SEQ ID NO: 9457 - DNA, 20 bp, Unknown
  Description of Unknown: gRNA target site sequence
tccagatgccagtgatggac

SEQ ID NO: 9458 - DNA, 20 bp, Unknown
  Description of Unknown: gRNA target site sequence
ccagatgccagtgatggaca

SEQ ID NO: 9459 - DNA, 20 bp, Unknown
  Description of Unknown: gRNA target site sequence
cagatgccagtgatggacaa

SEQ ID NO: 9460 - DNA, 20 bp, Unknown
  Description of Unknown: gRNA target site sequence
atgccagtgatggacaaggg

SEQ ID NO: 9461 - DNA, 20 bp, Unknown
  Description of Unknown: gRNA target site sequence
tgccagtgatggacaagggc

SEQ ID NO: 9462 - DNA, 20 bp, Unknown
  Description of Unknown: gRNA target site sequence
gccagtgatggacaagggcg

SEQ ID NO: 9463 - DNA, 20 bp, Unknown
  Description of Unknown: gRNA target site sequence
tggacaagggcggggctctg

SEQ ID NO: 9464 - DNA, 20 bp, Unknown
  Description of Unknown: gRNA target site sequence
ggacaagggcggggctctgt

SEQ ID NO: 9465 - DNA, 20 bp, Unknown
  Description of Unknown: gRNA target site sequence
gacaagggcggggctctgtg

SEQ ID NO: 9466 - DNA, 20 bp, Unknown
  Description of Unknown: gRNA target site sequence
agggcggggctctgtggggc

SEQ ID NO: 9467 - DNA, 20 bp, Unknown
  Description of Unknown: gRNA target site sequence
cggggctctgtggggctggc

SEQ ID NO: 9468 - DNA, 20 bp, Unknown
  Description of Unknown: gRNA target site sequence
tctgtggggctggcaagtca

SEQ ID NO: 9469 - DNA, 20 bp, Unknown
  Description of Unknown: gRNA target site sequence
tcacggtctcatgctttata

SEQ ID NO: 9470 - DNA, 20 bp, Unknown
  Description of Unknown: gRNA target site sequence
cacggtctcatgctttatac

SEQ ID NO: 9471 - DNA, 20 bp, Unknown
  Description of Unknown: gRNA target site sequence
ctcatgctttatacgggaaa

SEQ ID NO: 9472 - DNA, 20 bp, Unknown
  Description of Unknown: gRNA target site sequence
ttatacgggaaatagcatct

SEQ ID NO: 9473 - DNA, 20 bp, Unknown
  Description of Unknown: gRNA target site sequence
ggaaatagcatcttagaaac

SEQ ID NO: 9474 - DNA, 20 bp, Unknown
  Description of Unknown: gRNA target site sequence
tagaaaccagctgctcgtga

SEQ ID NO: 9475 - DNA, 20 bp, Unknown
  Description of Unknown: gRNA target site sequence
accagctgctcgtgatggac

SEQ ID NO: 9476 - DNA, 20 bp, Unknown
  Description of Unknown: gRNA target site sequence
ccagctgctcgtgatggact

SEQ ID NO: 9477 - DNA, 20 bp, Unknown
  Description of Unknown: gRNA target site sequence
gctcgtgatggactgggact

SEQ ID NO: 9478 - DNA, 20 bp, Unknown
  Description of Unknown: gRNA target site sequence
ctcgtgatggactgggactc

SEQ ID NO: 9479 - DNA, 20 bp, Unknown
  Description of Unknown: gRNA target site sequence
tcgtgatggactgggactca

SEQ ID NO: 9480 - DNA, 20 bp, Unknown
  Description of Unknown: gRNA target site sequence
gatggactgggactcaggga

SEQ ID NO: 9481 - DNA, 20 bp, Unknown
  Description of Unknown: gRNA target site sequence
atggactgggactcagggac

SEQ ID NO: 9482 - DNA, 20 bp, Unknown
  Description of Unknown: gRNA target site sequence
tgggactcagggacaggcac

SEQ ID NO: 9483 - DNA, 20 bp, Unknown
  Description of Unknown: gRNA target site sequence
caggcacaagctatcaatct

SEQ ID NO: 9484 - DNA, 20 bp, Unknown
  Description of Unknown: gRNA target site sequence
acaagctatcaatcttggcc

SEQ ID NO: 9485 - DNA, 20 bp, Unknown
  Description of Unknown: gRNA target site sequence
aagctatcaatcttggccaa

SEQ ID NO: 9486 - DNA, 20 bp, Unknown
  Description of Unknown: gRNA target site sequence
agctatcaatcttggccaag

SEQ ID NO: 9487 - DNA, 20 bp, Unknown
  Description of Unknown: gRNA target site sequence
tggccaagaggccatgattt

SEQ ID NO: 9488 - DNA, 20 bp, Unknown
  Description of Unknown: gRNA target site sequence
atttcagtgaacgttcacgc

SEQ ID NO: 9489 - DNA, 20 bp, Unknown
  Description of Unknown: gRNA target site sequence
tttcagtgaacgttcacgcc

SEQ ID NO: 9490 - DNA, 20 bp, Unknown
  Description of Unknown: gRNA target site sequence
gtgaacgttcacgccaggcc

SEQ ID NO: 9491 - DNA, 20 bp, Unknown
  Description of Unknown: gRNA target site sequence
ccaggcctggcctgccactc

SEQ ID NO: 9492 - DNA, 20 bp, Unknown
  Description of Unknown: gRNA target site sequence
caggcctggcctgccactca

SEQ ID NO: 9493 - DNA, 20 bp, Unknown
  Description of Unknown: gRNA target site sequence
actcaaggaaacctgaaatg

SEQ ID NO: 9494 - DNA, 20 bp, Unknown
  Description of Unknown: gRNA target site sequence
ctcaaggaaacctgaaatgc

SEQ ID NO: 9495 - DNA, 20 bp, Unknown
  Description of Unknown: gRNA target site sequence
tcaaggaaacctgaaatgca

SEQ ID NO: 9496 - DNA, 20 bp, Unknown
  Description of Unknown: gRNA target site sequence
ctgcttattcttttatttaa

SEQ ID NO: 9497 - DNA, 20 bp, Unknown
  Description of Unknown: gRNA target site sequence
tgcttattcttttatttaat

SEQ ID NO: 9498 - DNA, 20 bp, Unknown
  Description of Unknown: gRNA target site sequence
taggatcttcttcaaaaccc

SEQ ID NO: 9499 - DNA, 20 bp, Unknown
  Description of Unknown: gRNA target site sequence
aaaccccagcaatataactc

SEQ ID NO: 9500 - DNA, 20 bp, Unknown
  Description of Unknown: gRNA target site sequence
ccccagcaatataactctgg

SEQ ID NO: 9501 - DNA, 20 bp, Unknown
  Description of Unknown: gRNA target site sequence
ccagcaatataactctggca

SEQ ID NO: 9502 - DNA, 20 bp, Unknown
  Description of Unknown: gRNA target site sequence
aatataactctggcagagta

SEQ ID NO: 9503 - DNA, 20 bp, Unknown
  Description of Unknown: gRNA target site sequence
atataactctggcagagtaa

SEQ ID NO: 9504 - DNA, 20 bp, Unknown
  Description of Unknown: gRNA target site sequence
taactctggcagagtaaagg

SEQ ID NO: 9505 - DNA, 20 bp, Unknown
  Description of Unknown: gRNA target site sequence
aactctggcagagtaaaggc

SEQ ID NO: 9506 - DNA, 20 bp, Unknown
  Description of Unknown: gRNA target site sequence
tggcagagtaaaggcaggca

SEQ ID NO: 9507 - DNA, 20 bp, Unknown
  Description of Unknown: gRNA target site sequence
ggcagagtaaaggcaggcat

SEQ ID NO: 9508 - DNA, 20 bp, Unknown
  Description of Unknown: gRNA target site sequence
gtaaaggcaggcatgggaaa

SEQ ID NO: 9509 - DNA, 20 bp, Unknown
  Description of Unknown: gRNA target site sequence
taaaggcaggcatgggaaaa

SEQ ID NO: 9510 - DNA, 20 bp, Unknown
  Description of Unknown: gRNA target site sequence
gcaggcatgggaaaaaggcc

SEQ ID NO: 9511 - DNA, 20 bp, Unknown
  Description of Unknown: gRNA target site sequence
catgggaaaaaggcccagca

SEQ ID NO: 9512 - DNA, 20 bp, Unknown
  Description of Unknown: gRNA target site sequence
gcaaagcaaactgtacatct

SEQ ID NO: 9513 - DNA, 20 bp, Unknown
  Description of Unknown: gRNA target site sequence
aaactgtacatcttggaatc

SEQ ID NO: 9514 - DNA, 20 bp, Unknown
  Description of Unknown: gRNA target site sequence
actgtacatcttggaatctg

SEQ ID NO: 9515 - DNA, 20 bp, Unknown
  Description of Unknown: gRNA target site sequence
gtacatcttggaatctggag

SEQ ID NO: 9516 - DNA, 20 bp, Unknown
  Description of Unknown: gRNA target site sequence
ctggagtggtctccccaact

SEQ ID NO: 9517 - DNA, 20 bp, Unknown
  Description of Unknown: gRNA target site sequence
tggagtggtctccccaactt

SEQ ID NO: 9518 - DNA, 20 bp, Unknown
  Description of Unknown: gRNA target site sequence
gtggtctccccaacttaggc

SEQ ID NO: 9519 - DNA, 20 bp, Unknown
  Description of Unknown: gRNA target site sequence
tggtctccccaacttaggct

SEQ ID NO: 9520 - DNA, 20 bp, Unknown
  Description of Unknown: gRNA target site sequence
ccccaacttaggctgggcat

SEQ ID NO: 9521 - DNA, 20 bp, Unknown
  Description of Unknown: gRNA target site sequence
caacttaggctgggcattag

SEQ ID NO: 9522 - DNA, 20 bp, Unknown
  Description of Unknown: gRNA target site sequence
taggctgggcattagcagaa

SEQ ID NO: 9523 - DNA, 20 bp, Unknown
  Description of Unknown: gRNA target site sequence
aggctgggcattagcagaat

SEQ ID NO: 9524 - DNA, 20 bp, Unknown
  Description of Unknown: gRNA target site sequence
gctgggcattagcagaatgg

SEQ ID NO: 9525 - DNA, 20 bp, Unknown
  Description of Unknown: gRNA target site sequence
ctgggcattagcagaatggg

SEQ ID NO: 9526 - DNA, 20 bp, Unknown
  Description of Unknown: gRNA target site sequence
ttagcagaatgggaggttta

SEQ ID NO: 9527 - DNA, 20 bp, Unknown
  Description of Unknown: gRNA target site sequence
atgggaggtttatggtatgt

SEQ ID NO: 9528 - DNA, 20 bp, Unknown
  Description of Unknown: gRNA target site sequence
gtttatggtatgttggcatt

SEQ ID NO: 9529 - DNA, 20 bp, Unknown
  Description of Unknown: gRNA target site sequence
atggtatgttggcattaagt

SEQ ID NO: 9530 - DNA, 20 bp, Unknown
  Description of Unknown: gRNA target site sequence
tggtatgttggcattaagtt

SEQ ID NO: 9531 - DNA, 20 bp, Unknown
  Description of Unknown: gRNA target site sequence
tgggaaatctatcacattac

SEQ ID NO: 9532 - DNA, 20 bp, Unknown
  Description of Unknown: gRNA target site sequence
gggaaatctatcacattacc

SEQ ID NO: 9533 - DNA, 20 bp, Unknown
  Description of Unknown: gRNA target site sequence
gaaatctatcacattaccag

SEQ ID NO: 9534 - DNA, 20 bp, Unknown
  Description of Unknown: gRNA target site sequence
ggagattgctctctcattga

SEQ ID NO: 9535 - DNA, 20 bp, Unknown
  Description of Unknown: gRNA target site sequence
agattgctctctcattgata

SEQ ID NO: 9536 - DNA, 20 bp, Unknown
  Description of Unknown: gRNA target site sequence
gattgctctctcattgatag

SEQ ID NO: 9537 - DNA, 20 bp, Unknown
  Description of Unknown: gRNA target site sequence
agaggttttgaactataaat

SEQ ID NO: 9538 - DNA, 20 bp, Unknown
  Description of Unknown: gRNA target site sequence
aaatcagaacacctgcgtct

SEQ ID NO: 9539 - DNA, 20 bp, Unknown
  Description of Unknown: gRNA target site sequence
gaacacctgcgtctaagccc

SEQ ID NO: 9540 - DNA, 20 bp, Unknown
  Description of Unknown: gRNA target site sequence
cgctaccgtttacttgatat

SEQ ID NO: 9541 - DNA, 20 bp, Unknown
  Description of Unknown: gRNA target site sequence
gctaccgtttacttgatata

SEQ ID NO: 9542 - DNA, 20 bp, Unknown
  Description of Unknown: gRNA target site sequence
tttacttgatataaggcctt

SEQ ID NO: 9543 - DNA, 20 bp, Unknown
  Description of Unknown: gRNA target site sequence
cttgatataaggccttgagc

SEQ ID NO: 9544 - DNA, 20 bp, Unknown
  Description of Unknown: gRNA target site sequence
ataaggccttgagcaagtca

SEQ ID NO: 9545 - DNA, 20 bp, Unknown
  Description of Unknown: gRNA target site sequence
aggccttgagcaagtcacag

SEQ ID NO: 9546 - DNA, 26 bp, Unknown
  Description of Unknown: gRNA target site sequence
acggtctcatgctttatacgggaaat

SEQ ID NO: 9547 - DNA, 26 bp, Unknown
  Description of Unknown: gRNA target site sequence
attcatgtgccggcacaatcagtgat

SEQ ID NO: 9548 - DNA, 26 bp, Unknown
  Description of Unknown: gRNA target site sequence
caatggataaggccgagaccaccaat

SEQ ID NO: 9549 - DNA, 26 bp, Unknown
  Description of Unknown: gRNA target site sequence
ctggtgcattcatgtgccggcacaat

SEQ ID NO: 9550 - DNA, 26 bp, Unknown
  Description of Unknown: gRNA target site sequence
gtctctcagctggtacacggcagggt

SEQ ID NO: 9551 - DNA, 26 bp, Unknown
  Description of Unknown: gRNA target site sequence
agccccagcgctaccgtttacttgat

SEQ ID NO: 9552 - DNA, 26 bp, Unknown
  Description of Unknown: gRNA target site sequence
gtcccagtccatcacgagcagctggt

SEQ ID NO: 9553 - DNA, 26 bp, Unknown
  Description of Unknown: gRNA target site sequence
ggcctggcgtgaacgttcactgaaat

SEQ ID NO: 9554 - DNA, 26 bp, Unknown
  Description of Unknown: gRNA target site sequence
agatgggctcccccaactagaatggt

SEQ ID NO: 9555 - DNA, 26 bp, Unknown
  Description of Unknown: gRNA target site sequence
ttgtttgagaatcaaaatcggtgaat

SEQ ID NO: 9556 - DNA, 26 bp, Unknown
  Description of Unknown: gRNA target site sequence
aggccgagaccaccaatcagaggagt

SEQ ID NO: 9557 - DNA, 26 bp, Unknown
  Description of Unknown: gRNA target site sequence
ctgtctgcctattcaccgattttgat

SEQ ID NO: 9558 - DNA, 26 bp, Unknown
  Description of Unknown: gRNA target site sequence
aagtccaaataacttcagattggaat

SEQ ID NO: 9559 - DNA, 26 bp, Unknown
  Description of Unknown: gRNA target site sequence
ctctgccagagttatattgctggggt

SEQ ID NO: 9560 - DNA, 26 bp, Unknown
  Description of Unknown: gRNA target site sequence
gccggcacaatcagtgattggtgggt

SEQ ID NO: 9561 - DNA, 26 bp, Unknown
  Description of Unknown: gRNA target site sequence
ggggagaccactccagattccaagat

SEQ ID NO: 9562 - DNA, 26 bp, Unknown
  Description of Unknown: gRNA target site sequence
caacttaggctgggcattagcagaat

SEQ ID NO: 9563 - DNA, 26 bp, Unknown
  Description of Unknown: gRNA target site sequence
ggtctatggacttcaagagcaacagt

SEQ ID NO: 9564 - DNA, 26 bp, Unknown
  Description of Unknown: gRNA target site sequence
agccttgttctggcagtccagagaat

SEQ ID NO: 9565 - DNA, 26 bp, Unknown
  Description of Unknown: gRNA target site sequence
tccatagacctcatgtctagcacagt

SEQ ID NO: 9566 - DNA, 26 bp, Unknown
  Description of Unknown: gRNA target site sequence
cctgaaatgcagggctacttaataat

SEQ ID NO: 9567 - DNA, 26 bp, Unknown
  Description of Unknown: gRNA target site sequence
gacagatgggctcccccaactagaat

SEQ ID NO: 9568 - DNA, 26 bp, Unknown
  Description of Unknown: gRNA target site sequence
gagattgctctctcattgatagaggt

SEQ ID NO: 9569 - DNA, 26 bp, Unknown
  Description of Unknown: gRNA target site sequence
gagtgactgcgtgagactgacttagt

SEQ ID NO: 9570 - DNA, 26 bp, Unknown
  Description of Unknown: gRNA target site sequence
ggtagcgctggggcttagacgcaggt

SEQ ID NO: 9571 - DNA, 26 bp, Unknown
  Description of Unknown: gRNA target site sequence
catcacgagcagctggtttctaagat

SEQ ID NO: 9572 - DNA, 26 bp, Unknown
  Description of Unknown: gRNA target site sequence
atcactgattgtgccggcacatgaat

SEQ ID NO: 9573 - DNA, 26 bp, Unknown
  Description of Unknown: gRNA target site sequence
tgcattcatgtgccggcacaatcagt

SEQ ID NO: 9574 - DNA, 26 bp, Unknown
  Description of Unknown: gRNA target site sequence
tacacggcagggtcagggttctggat

SEQ ID NO: 9575 - DNA, 26 bp, Unknown
  Description of Unknown: gRNA target site sequence
aaatgagatcatgtcctaaccctgat

SEQ ID NO: 9576 - DNA, 26 bp, Unknown
  Description of Unknown: gRNA target site sequence
ggtatgttggcattaagttgggaaat

SEQ ID NO: 9577 - DNA, 26 bp, Unknown
  Description of Unknown: gRNA target site sequence
cgtgtaccagctgagagactctaaat

SEQ ID NO: 9578 - DNA, 26 bp, Unknown
  Description of Unknown: gRNA target site sequence
taccaggagattgctctctcattgat

SEQ ID NO: 9579 - DNA, 26 bp, Unknown
  Description of Unknown: gRNA target site sequence
gttgaaggcgtttgcacatgcaaagt

SEQ ID NO: 9580 - DNA, 26 bp, Unknown
  Description of Unknown: gRNA target site sequence
tatctgtgggacaagaggatcagggt

SEQ ID NO: 9581 - DNA, 26 bp, Unknown
  Description of Unknown: gRNA target site sequence
aggatcttcttcaaaaccccagcaat

SEQ ID NO: 9582 - DNA, 26 bp, Unknown
  Description of Unknown: gRNA target site sequence
gcctgccactcaaggaaacctgaaat

SEQ ID NO: 9583 - DNA, 26 bp, Unknown
  Description of Unknown: gRNA target site sequence
aggtggctgttttctcaaccctgagt

SEQ ID NO: 9584 - DNA, 26 bp, Unknown
  Description of Unknown: gRNA target site sequence
ttattaagtagccctgcatttcaggt

SEQ ID NO: 9585 - DNA, 26 bp, Unknown
  Description of Unknown: gRNA target site sequence
aatctttcccagctcactaagtcagt

SEQ ID NO: 9586 - DNA, 26 bp, Unknown
  Description of Unknown: gRNA target site sequence
aaccctgatcctcttgtcccacagat

SEQ ID NO: 9587 - DNA, 26 bp, Unknown
  Description of Unknown: gRNA target site sequence
ctggggaagaaggtgtcttctggaat

SEQ ID NO: 9588 - DNA, 26 bp, Unknown
  Description of Unknown: gRNA target site sequence
cattagcagaatgggaggtttatggt

SEQ ID NO: 9589 - DNA, 26 bp, Unknown
  Description of Unknown: gRNA target site sequence
ttctgcccagagctctggtcaatgat

SEQ ID NO: 9590 - DNA, 26 bp, Unknown
  Description of Unknown: gRNA target site sequence
gcacaatcagtgattggtgggttaat

SEQ ID NO: 9591 - DNA, 26 bp, Unknown
  Description of Unknown: gRNA target site sequence
aggcgtttgcacatgcaaagtcagat

SEQ ID NO: 9592 - DNA, 26 bp, Unknown
  Description of Unknown: gRNA target site sequence
gcaaagcaaactgtacatcttggaat

SEQ ID NO: 9593 - DNA, 26 bp, Unknown
  Description of Unknown: gRNA target site sequence
aggtttatggtatgttggcattaagt

SEQ ID NO: 9594 - DNA, 26 bp, Unknown
  Description of Unknown: gRNA target site sequence
cactcattaacccaccaatcactgat

SEQ ID NO: 9595 - DNA, 26 bp, Unknown
  Description of Unknown: gRNA target site sequence
gcctgggttggggcaaagagggaaat

SEQ ID NO: 9596 - DNA, 26 bp, Unknown
  Description of Unknown: gRNA target site sequence
ccagcccaggtaagggcagctttggt

SEQ ID NO: 9597 - DNA, 26 bp, Unknown
  Description of Unknown: gRNA target site sequence
tgtgccggcacatgaatgcaccaggt

SEQ ID NO: 9598 - DNA, 26 bp, Unknown
  Description of Unknown: gRNA target site sequence
aaacaaatgtgtcacaaagtaaggat

SEQ ID NO: 9599 - DNA, 26 bp, Unknown
  Description of Unknown: gRNA target site sequence
ggctgggcattagcagaatgggaggt

SEQ ID NO: 9600 - DNA, 26 bp, Unknown
  Description of Unknown: gRNA target site sequence
atcaatcttggccaagaggccatgat

SEQ ID NO: 9601 - DNA, 26 bp, Unknown
  Description of Unknown: gRNA target site sequence
cagctggtacacggcagggtcagggt

SEQ ID NO: 9602 - DNA, 26 bp, Unknown
  Description of Unknown: gRNA target site sequence
ccccagcaatataactctggcagagt

SEQ ID NO: 9603 - DNA, 26 bp, Unknown
  Description of Unknown: gRNA target site sequence
gggttttgaagaagatcctattaaat

SEQ ID NO: 9604 - DNA, 26 bp, Unknown
  Description of Unknown: gRNA target site sequence
ttgatagcttgtgcctgtccctgagt

SEQ ID NO: 9605 - DNA, 26 bp, Unknown
  Description of Unknown: gRNA target site sequence
cttagaatgaggcctagaagagcagt

SEQ ID NO: 9606 - DNA, 26 bp, Unknown
  Description of Unknown: gRNA target site sequence
cttggccaagaggccatgatttcagt

SEQ ID NO: 9607 - DNA, 26 bp, Unknown
  Description of Unknown: gRNA target site sequence
tcaaggccttatatcaagtaaacggt

SEQ ID NO: 9608 - DNA, 26 bp, Unknown
  Description of Unknown: gRNA target site sequence
atctgtcagctgggaaaagtccaaat

SEQ ID NO: 9609 - DNA, 26 bp, Unknown
  Description of Unknown: gRNA target site sequence
ataggcagacagacttgtcactggat

SEQ ID NO: 9610 - DNA, 26 bp, Unknown
  Description of Unknown: gRNA target site sequence
atgtctagcacagttttgtctgtgat

SEQ ID NO: 9611 - DNA, 26 bp, Unknown
  Description of Unknown: gRNA target site sequence
aaaacctctatcaatgagagagcaat

SEQ ID NO: 9612 - DNA, 26 bp, Unknown
  Description of Unknown: gRNA target site sequence
aaacctgaaatgcagggctacttaat

SEQ ID NO: 9613 - DNA, 26 bp, Unknown
  Description of Unknown: gRNA target site sequence
gcacacccctcatctgactttttaat

SEQ ID NO: 9614 - DNA, 26 bp, Unknown
  Description of Unknown: gRNA target site sequence
tgatgtctaaaactcctctgattggt

SEQ ID NO: 9615 - DNA, 26 bp, Unknown
  Description of Unknown: gRNA target site sequence
agagagcaatctcctggtaatgtgat

SEQ ID NO: 9616 - DNA, 26 bp, Unknown
  Description of Unknown: gRNA target site sequence
gaaacagtgagccttgttctggcagt

SEQ ID NO: 9617 - DNA, 26 bp, Unknown
  Description of Unknown: gRNA target site sequence
tggggcttagacgcaggtgttctgat

SEQ ID NO: 9618 - DNA, 26 bp, Unknown
  Description of Unknown: gRNA target site sequence
atgtgccggcacaatcagtgattggt

SEQ ID NO: 9619 - DNA, 26 bp, Unknown
  Description of Unknown: gRNA target site sequence
accagctgagagactctaaatccagt

SEQ ID NO: 9620 - DNA, 26 bp, Unknown
  Description of Unknown: gRNA target site sequence
aatcagtgattggtgggttaatgagt

SEQ ID NO: 9621 - DNA, 26 bp, Unknown
  Description of Unknown: gRNA target site sequence
gctctgtggggctggcaagtcacggt

SEQ ID NO: 9622 - DNA, 26 bp, Unknown
  Description of Unknown: gRNA target site sequence
actggatttagagtctctcagctggt

SEQ ID NO: 9623 - DNA, 26 bp, Unknown
  Description of Unknown: gRNA target site sequence
gccctgcatttcaggtttccttgagt

SEQ ID NO: 9624 - DNA, 26 bp, Unknown
  Description of Unknown: gRNA target site sequence
acccaggctggagtccagatgccagt

SEQ ID NO: 9625 - DNA, 26 bp, Unknown
  Description of Unknown: gRNA target site sequence
ccattctgctaatgcccagcctaagt

SEQ ID NO: 9626 - DNA, 26 bp, Unknown
  Description of Unknown: gRNA target site sequence
tcaatgatgtctaaaactcctctgat

SEQ ID NO: 9627 - DNA, 26 bp, Unknown
  Description of Unknown: gRNA target site sequence
aaactgtacatcttggaatctggagt

SEQ ID NO: 9628 - DNA, 26 bp, Unknown
  Description of Unknown: gRNA target site sequence
caatgagagagcaatctcctggtaat

SEQ ID NO: 9629 - DNA, 26 bp, Unknown
  Description of Unknown: gRNA target site sequence
tgcaccaggtgttgaagtggaggaat

SEQ ID NO: 9630 - DNA, 26 bp, Unknown
  Description of Unknown: gRNA target site sequence
catgcctgcctttactctgccagagt

SEQ ID NO: 9631 - DNA, 26 bp, Unknown
  Description of Unknown: gRNA target site sequence
agttaaaacacattccaatctgaagt

SEQ ID NO: 9632 - DNA, 26 bp, Unknown
  Description of Unknown: gRNA target site sequence
gtgcccagaggaagcaccattctagt

SEQ ID NO: 9633 - DNA, 26 bp, Unknown
  Description of Unknown: gRNA target site sequence
gcttgtgcctgtccctgagtcccagt

SEQ ID NO: 9634 - DNA, 26 bp, Unknown
  Description of Unknown: gRNA target site sequence
aaaaaatctttcccagctcactaagt

SEQ ID NO: 9635 - DNA, 26 bp, Unknown
  Description of Unknown: gRNA target site sequence
atcatggcctcttggccaagattgat

SEQ ID NO: 9636 - DNA, 26 bp, Unknown
  Description of Unknown: gRNA target site sequence
ccactccagattccaagatgtacagt

SEQ ID NO: 9637 - DNA, 26 bp, Unknown
  Description of Unknown: gRNA target site sequence
gacttgctcaaggccttatatcaagt

SEQ ID NO: 9638 - DNA, 26 bp, Unknown
  Description of Unknown: gRNA target site sequence
ggaaatctatcacattaccaggagat

SEQ ID NO: 9639 - DNA, 26 bp, Unknown
  Description of Unknown: gRNA target site sequence
agcaatctcctggtaatgtgatagat

SEQ ID NO: 9640 - DNA, 26 bp, Unknown
  Description of Unknown: gRNA target site sequence
tgaaatcatggcctcttggccaagat

SEQ ID NO: 9641 - DNA, 26 bp, Unknown
  Description of Unknown: gRNA target site sequence
tatcaatgagagagcaatctcctggt

SEQ ID NO: 9642 - DNA, 26 bp, Unknown
  Description of Unknown: gRNA target site sequence
gagagggcacgtggcccagcctcagt

SEQ ID NO: 9643 - DNA, 26 bp, Unknown
  Description of Unknown: gRNA target site sequence
acaagtctgtctgcctattcaccgat

SEQ ID NO: 9644 - DNA, 26 bp, Unknown
  Description of Unknown: gRNA target site sequence
taccataaacctcccattctgctaat

SEQ ID NO: 9645 - DNA, 26 bp, Unknown
  Description of Unknown: gRNA target site sequence
ctcagggacaggcacaagctatcaat

SEQ ID NO: 9646 - DNA, 26 bp, Unknown
  Description of Unknown: gRNA target site sequence
acgcagtcactcattaacccaccaat

SEQ ID NO: 9647 - DNA, 26 bp, Unknown
  Description of Unknown: gRNA target site sequence
ttaattcctccacttcaacacctggt

SEQ ID NO: 9648 - DNA, 26 bp, Unknown
  Description of Unknown: gRNA target site sequence
gcaggctgtttccttgcttcaggaat

SEQ ID NO: 9649 - DNA, 26 bp, Unknown
  Description of Unknown: gRNA target site sequence
attgatagaggttttgaactataaat

SEQ ID NO: 9650 - DNA, 26 bp, Unknown
  Description of Unknown: gRNA target site sequence
cagaacaaggctcactgtttcttagt

SEQ ID NO: 9651 - DNA, 26 bp, Unknown
  Description of Unknown: gRNA target site sequence
caagaggatcagggttaggacatgat

SEQ ID NO: 9652 - DNA, 26 bp, Unknown
  Description of Unknown: gRNA target site sequence
cctcattctaagccccttctccaagt

SEQ ID NO: 9653 - DNA, 26 bp, Unknown
  Description of Unknown: gRNA target site sequence
agacaaaactgtgctagacatgaggt

SEQ ID NO: 9654 - DNA, 26 bp, Unknown
  Description of Unknown: gRNA target site sequence
gggaagaaggtgtcttctggaataat

SEQ ID NO: 9655 - DNA, 26 bp, Unknown
  Description of Unknown: gRNA target site sequence
aaaacagccaccttcaggacaaaagt

SEQ ID NO: 9656 - DNA, 26 bp, Unknown
  Description of Unknown: gRNA target site sequence
tgtctaaaactcctctgattggtggt

SEQ ID NO: 9657 - DNA, 26 bp, Unknown
  Description of Unknown: gRNA target site sequence
ggccacagcactgttgctcttgaagt

SEQ ID NO: 9658 - DNA, 26 bp, Unknown
  Description of Unknown: gRNA target site sequence
atgtgtcacaaagtaaggattctgat

SEQ ID NO: 9659 - DNA, 26 bp, Unknown
  Description of Unknown: gRNA target site sequence
atttggacttttcccagctgacagat

SEQ ID NO: 9660 - DNA, 26 bp, Unknown
  Description of Unknown: gRNA target site sequence
aaaccctctttttactaagaaacagt

SEQ ID NO: 9661 - DNA, 26 bp, Unknown
  Description of Unknown: gRNA target site sequence
caggctggagtccagatgccagtgat

SEQ ID NO: 9662 - DNA, 26 bp, Unknown
  Description of Unknown: gRNA target site sequence
aagacaccttcttccccagcccaggt

SEQ ID NO: 9663 - DNA, 26 bp, Unknown
  Description of Unknown: gRNA target site sequence
tctggatatctgtgggacaagaggat

SEQ ID NO: 9664 - DNA, 26 bp, Unknown
  Description of Unknown: gRNA target site sequence
agctcactaagtcagtctcacgcagt

SEQ ID NO: 9665 - DNA, 26 bp, Unknown
  Description of Unknown: gRNA target site sequence
gtgttgaagtggaggaattaaaaagt

SEQ ID NO: 9666 - DNA, 26 bp, Unknown
  Description of Unknown: gRNA target site sequence
tagaagagcagtaaggggcaaacagt

SEQ ID NO: 9667 - DNA, 26 bp, Unknown
  Description of Unknown: gRNA target site sequence
attctcaaacaaatgtgtcacaaagt

SEQ ID NO: 9668 - DNA, 26 bp, Unknown
  Description of Unknown: gRNA target site sequence
ctgtacatcttggaatctggagtggt

SEQ ID NO: 9669 - DNA, 26 bp, Unknown
  Description of Unknown: gRNA target site sequence
tcaccgattttgattctcaaacaaat

SEQ ID NO: 9670 - DNA, 26 bp, Unknown
  Description of Unknown: gRNA target site sequence
ttatttctccctgtctgccaaaaaat

SEQ ID NO: 9671 - DNA, 26 bp, Unknown
  Description of Unknown: gRNA target site sequence
ggccaggttctgcccagagctctggt

SEQ ID NO: 9672 - DNA, 26 bp, Unknown
  Description of Unknown: gRNA target site sequence
tagacgcaggtgttctgatttatagt

SEQ ID NO: 9673 - DNA, 26 bp, Unknown
  Description of Unknown: gRNA target site sequence
aaaagagggttttggtggcaatggat

SEQ ID NO: 9674 - DNA, 26 bp, Unknown
  Description of Unknown: gRNA target site sequence
catcttagaaaccagctgctcgtgat

SEQ ID NO: 9675 - DNA, 26 bp, Unknown
  Description of Unknown: gRNA target site sequence
gactgacttagtgagctgggaaagat

SEQ ID NO: 9676 - DNA, 26 bp, Unknown
  Description of Unknown: gRNA target site sequence
cagtgctgtggcctggagcaacaaat

SEQ ID NO: 9677 - DNA, 26 bp, Unknown
  Description of Unknown: gRNA target site sequence
tttcttagtaaaaagagggttttggt

SEQ ID NO: 9678 - DNA, 26 bp, Unknown
  Description of Unknown: gRNA target site sequence
tacttgatataaggccttgagcaagt

SEQ ID NO: 9679 - DNA, 26 bp, Unknown
  Description of Unknown: gRNA target site sequence
gattggaatgtgttttaactcagggt

SEQ ID NO: 9680 - DNA, 26 bp, Unknown
  Description of Unknown: gRNA target site sequence
gacagacttgtcactggatttagagt

SEQ ID NO: 9681 - DNA, 26 bp, Unknown
  Description of Unknown: gRNA target site sequence
taatgtgatagatttcccaacttaat

SEQ ID NO: 9682 - DNA, 26 bp, Unknown
  Description of Unknown: gRNA target site sequence
aaccctgagttaaaacacattccaat

SEQ ID NO: 9683 - DNA, 26 bp, Unknown
  Description of Unknown: gRNA target site sequence
tgggaaaagtccaaataacttcagat

SEQ ID NO: 9684 - DNA, 26 bp, Unknown
  Description of Unknown: gRNA target site sequence
actttgtgacacatttgtttgagaat

SEQ ID NO: 9685 - DNA, 26 bp, Unknown
  Description of Unknown: gRNA target site sequence
tatattgctggggttttgaagaagat

SEQ ID NO: 9686 - DNA, 26 bp, Unknown
  Description of Unknown: gRNA target site sequence
cacatgaatgcaccaggtgttgaagt

SEQ ID NO: 9687 - DNA, 26 bp, Unknown
  Description of Unknown: gRNA target site sequence
ctctttgccccaacccaggctggagt

SEQ ID NO: 9688 - DNA, 26 bp, Unknown
  Description of Unknown: gRNA target site sequence
aggttctgcccagagctctggtcaat

SEQ ID NO: 9689 - DNA, 26 bp, Unknown
  Description of Unknown: gRNA target site sequence
tcactgtttcttagtaaaaagagggt

SEQ ID NO: 9690 - DNA, 26 bp, Unknown
  Description of Unknown: gRNA target site sequence
cccagcctcagtctctccaactgagt

SEQ ID NO: 9691 - DNA, 26 bp, Unknown
  Description of Unknown: gRNA target site sequence
cctaagttggggagaccactccagat

SEQ ID NO: 9692 - DNA, 26 bp, Unknown
  Description of Unknown: gRNA target site sequence
agattttttggcagacagggagaaat

SEQ ID NO: 9693 - DNA, 26 bp, Unknown
  Description of Unknown: gRNA target site sequence
aggaattaaaaagtcagatgaggggt

SEQ ID NO: 9694 - DNA, 26 bp, Unknown
  Description of Unknown: gRNA target site sequence
ggcggggctctgtggggctggcaagt

SEQ ID NO: 9695 - DNA, 26 bp, Unknown
  Description of Unknown: gRNA target site sequence
tttgtctgtgatatacacatcagaat

SEQ ID NO: 9696 - DNA, 26 bp, Unknown
  Description of Unknown: gRNA target site sequence
taatactgcttattcttttatttaat

SEQ ID NO: 9697 - DNA, 26 bp, Unknown
  Description of Unknown: gRNA target site sequence
aagaagatcctattaaataaaagaat

SEQ ID NO: 9698 - DNA, 26 bp, Unknown
  Description of Unknown: gRNA target site sequence
taaaagaataagcagtattattaagt

SEQ ID NO: 9699 - DNA, 26 bp, Unknown
  Description of Unknown: gRNA target site sequence
gaagtggaggaattaaaaagtcagat

SEQ ID NO: 9700 - DNA, 26 bp, Unknown
  Description of Unknown: gRNA target site sequence
gagcccatctgtcagctgggaaaagt

SEQ ID NO: 9701 - DNA, 26 bp, Unknown
  Description of Unknown: gRNA target site sequence
ggcaacttggagaaggggcttagaat

SEQ ID NO: 9702 - DNA, 26 bp, Unknown
  Description of Unknown: gRNA target site sequence
tcctattaaataaaagaataagcagt

SEQ ID NO: 9703 - DNA, 26 bp, Unknown
  Description of Unknown: gRNA target site sequence
cccttacctgggctggggaagaaggt

SEQ ID NO: 9704 - DNA, 26 bp, Unknown
  Description of Unknown: gRNA target site sequence
atttatagttcaaaacctctatcaat

SEQ ID NO: 9705 - DNA, 26 bp, Unknown
  Description of Unknown: gRNA target site sequence
gagaatgacacgggaaaaaagcagat

SEQ ID NO: 9706 - DNA, 26 bp, Unknown
  Description of Unknown: gRNA target site sequence
agtaaaaagagggttttggtggcaat

SEQ ID NO: 9707 - DNA, 26 bp, Unknown
  Description of Unknown: gRNA target site sequence
tgacacatttgtttgagaatcaaaat

SEQ ID NO: 9708 - DNA, 26 bp, Unknown
  Description of Unknown: gRNA target site sequence
ggttggggcaaagagggaaatgagat

SEQ ID NO: 9709 - DNA, 26 bp, Unknown
  Description of Unknown: gRNA target site sequence
tttccttgcttcaggaatggccaggt

SEQ ID NO: 9710 - DNA, 26 bp, Unknown
  Description of Unknown: gRNA target site sequence
gagagactctaaatccagtgacaagt

SEQ ID NO: 9711 - DNA, 26 bp, Unknown
  Description of Unknown: gRNA target site sequence
gggaaaaaagcagatgaagagaaggt

SEQ ID NO: 9712 - DNA, 26 bp, Unknown
  Description of Unknown: gRNA target site sequence
acatttgtttgagaatcaaaatcggt

SEQ ID NO: 9713 - DNA, 26 bp, Unknown
  Description of Unknown: gRNA target site sequence
actggcatctggactccagcctgggt

SEQ ID NO: 9714 - DNA, 26 bp, Unknown
  Description of Unknown: gRNA target site sequence
caaaggcaggcaggcaggaactcagt

SEQ ID NO: 9715 - DNA, 26 bp, Unknown
  Description of Unknown: gRNA target site sequence
ctgcttattcttttatttaataggat

SEQ ID NO: 9716 - DNA, 26 bp, Unknown
  Description of Unknown: gRNA target site sequence
gccccaacccaggctggagtccagat

SEQ ID NO: 9717 - DNA, 27 bp, Unknown
  Description of Unknown: gRNA target site sequence
tgacagatgggctcccccaactagaat

SEQ ID NO: 9718 - DNA, 27 bp, Unknown
  Description of Unknown: gRNA target site sequence
aggcaacttggagaaggggcttagaat

SEQ ID NO: 9719 - DNA, 27 bp, Unknown
  Description of Unknown: gRNA target site sequence
tttatacgggaaatagcatcttagaaa

SEQ ID NO: 9720 - DNA, 27 bp, Unknown
  Description of Unknown: gRNA target site sequence
ccaacttaggctgggcattagcagaat

SEQ ID NO: 9721 - DNA, 27 bp, Unknown
  Description of Unknown: gRNA target site sequence
gagccttgttctggcagtccagagaat

SEQ ID NO: 9722 - DNA, 27 bp, Unknown
  Description of Unknown: gRNA target site sequence
aatgtgttttaactcagggttgagaaa

SEQ ID NO: 9723 - DNA, 27 bp, Unknown
  Description of Unknown: gRNA target site sequence
caccaaaaccctctttttactaagaaa

SEQ ID NO: 9724 - DNA, 27 bp, Unknown
  Description of Unknown: gRNA target site sequence
tactttgtgacacatttgtttgagaat

SEQ ID NO: 9725 - DNA, 27 bp, Unknown
  Description of Unknown: gRNA target site sequence
gaagaagatcctattaaataaaagaat

SEQ ID NO: 9726 - DNA, 27 bp, Unknown
  Description of Unknown: gRNA target site sequence
aaagattttttggcagacagggagaaa

SEQ ID NO: 9727 - DNA, 27 bp, Unknown
  Description of Unknown: gRNA target site sequence
ttttgtctgtgatatacacatcagaat

SEQ ID NO: 9728 - DNA, 28 bp, Unknown
  Description of Unknown: gRNA target site sequence
ctggggcttagacgcaggtgttctgatt

SEQ ID NO: 9729 - DNA, 28 bp, Unknown
  Description of Unknown: gRNA target site sequence
aataggcagacagacttgtcactggatt

SEQ ID NO: 9730 - DNA, 28 bp, Unknown
  Description of Unknown: gRNA target site sequence
tatcaatcttggccaagaggccatgatt

SEQ ID NO: 9731 - DNA, 28 bp, Unknown
  Description of Unknown: gRNA target site sequence
ctgggaaaagtccaaataacttcagatt

SEQ ID NO: 9732 - DNA, 28 bp, Unknown
  Description of Unknown: gRNA target site sequence
tcactcattaacccaccaatcactgatt

SEQ ID NO: 9733 - DNA, 28 bp, Unknown
  Description of Unknown: gRNA target site sequence
agactgacttagtgagctgggaaagatt

SEQ ID NO: 9734 - DNA, 28 bp, Unknown
  Description of Unknown: gRNA target site sequence
cattcatgtgccggcacaatcagtgatt

SEQ ID NO: 9735 - DNA, 28 bp, Unknown
  Description of Unknown: gRNA target site sequence
tctgtctgcctattcaccgattttgatt

SEQ ID NO: 9736 - DNA, 28 bp, Unknown
  Description of Unknown: gRNA target site sequence
ctgaaatcatggcctcttggccaagatt

SEQ ID NO: 9737 - DNA, 28 bp, Unknown
  Description of Unknown: gRNA target site sequence
gtcaatgatgtctaaaactcctctgatt

SEQ ID NO: 9738 - DNA, 28 bp, Unknown
  Description of Unknown: gRNA target site sequence
gcctaagttggggagaccactccagatt

SEQ ID NO: 9739 - DNA, 28 bp, Unknown
  Description of Unknown: gRNA target site sequence
gacaagtctgtctgcctattcaccgatt

SEQ ID NO: 9740 - DNA, 28 bp, Unknown
  Description of Unknown: gRNA target site sequence
aaggcgtttgcacatgcaaagtcagatt

SEQ ID NO: 9741 - DNA, 28 bp, Unknown
  Description of Unknown: gRNA target site sequence
gagcaatctcctggtaatgtgatagatt

SEQ ID NO: 9742 - DNA, 28 bp, Unknown
  Description of Unknown: gRNA target site sequence
caaacaaatgtgtcacaaagtaaggatt

SEQ ID NO: 9743 - DNA, 28 bp, Unknown
  Description of Unknown: gRNA target site sequence
gggaaatctatcacattaccaggagatt

SEQ ID NO: 9744 - DNA, 26 bp, Unknown
  Description of Unknown: gRNA target site sequence
gtgttttaactcagggttgagaaaac

SEQ ID NO: 9745 - DNA, 26 bp, Unknown
  Description of Unknown: gRNA target site sequence
ctgttttctcaaccctgagttaaaac

SEQ ID NO: 9746 - DNA, 26 bp, Unknown
  Description of Unknown: gRNA target site sequence
aggtgttctgatttatagttcaaaac

SEQ ID NO: 9747 - DNA, 26 bp, Unknown
  Description of Unknown: gRNA target site sequence
tctgatgtgtatatcacagacaaaac

SEQ ID NO: 9748 - DNA, 26 bp, Unknown
  Description of Unknown: gRNA target site sequence
gagctctggtcaatgatgtctaaaac

SEQ ID NO: 9749 - DNA, 26 bp, Unknown
  Description of Unknown: gRNA target site sequence
tcggccttatccattgccaccaaaac

SEQ ID NO: 9750 - DNA, 26 bp, Unknown
  Description of Unknown: gRNA target site sequence
ttatttaataggatcttcttcaaaac

SEQ ID NO: 9751 - DNA, 27 bp, Unknown
  Description of Unknown: gRNA target site sequence
tttacttgatataaggccttgagcaag

SEQ ID NO: 9752 - DNA, 27 bp, Unknown
  Description of Unknown: gRNA target site sequence
tttgaactataaatcagaacacctgcg

SEQ ID NO: 9753 - DNA, 27 bp, Unknown
  Description of Unknown: gRNA target site sequence
tttatagttcaaaacctctatcaatga

SEQ ID NO: 9754 - DNA, 27 bp, Unknown
  Description of Unknown: gRNA target site sequence
tttcccaacttaatgccaacataccat

SEQ ID NO: 9755 - DNA, 27 bp, Unknown
  Description of Unknown: gRNA target site sequence
tttatggtatgttggcattaagttggg

SEQ ID NO: 9756 - DNA, 27 bp, Unknown
  Description of Unknown: gRNA target site sequence
tttgctttgctgggcctttttcccatg

SEQ ID NO: 9757 - DNA, 27 bp, Unknown
  Description of Unknown: gRNA target site sequence
tttgctgggcctttttcccatgcctgc

SEQ ID NO: 9758 - DNA, 27 bp, Unknown
  Description of Unknown: gRNA target site sequence
tttcccatgcctgcctttactctgcca

SEQ ID NO: 9759 - DNA, 27 bp, Unknown
  Description of Unknown: gRNA target site sequence
tttactctgccagagttatattgctgg

SEQ ID NO: 9760 - DNA, 27 bp, Unknown
  Description of Unknown: gRNA target site sequence
tttaataggatcttcttcaaaacccca

SEQ ID NO: 9761 - DNA, 27 bp, Unknown
  Description of Unknown: gRNA target site sequence
tttatttaataggatcttcttcaaaac

SEQ ID NO: 9762 - DNA, 27 bp, Unknown
  Description of Unknown: gRNA target site sequence
tttgaagaagatcctattaaataaaag

SEQ ID NO: 9763 - DNA, 27 bp, Unknown
  Description of Unknown: gRNA target site sequence
tttcaggtttccttgagtggcaggcca

SEQ ID NO: 9764 - DNA, 27 bp, Unknown
  Description of Unknown: gRNA target site sequence
tttccttgagtggcaggccaggcctgg

SEQ ID NO: 9765 - DNA, 27 bp, Unknown
  Description of Unknown: gRNA target site sequence
tttcagtgaacgttcacgccaggcctg

SEQ ID NO: 9766 - DNA, 27 bp, Unknown
  Description of Unknown: gRNA target site sequence
tttctaagatgctatttcccgtataaa

SEQ ID NO: 9767 - DNA, 27 bp, Unknown
  Description of Unknown: gRNA target site sequence
tttatacgggaaatagcatcttagaaa

SEQ ID NO: 9768 - DNA, 27 bp, Unknown
  Description of Unknown: gRNA target site sequence
tttcccgtataaagcatgagaccgtga

SEQ ID NO: 9769 - DNA, 27 bp, Unknown
  Description of Unknown: gRNA target site sequence
tttgccccaacccaggctggagtccag

SEQ ID NO: 9770 - DNA, 27 bp, Unknown
  Description of Unknown: gRNA target site sequence
tttccctctttgccccaacccaggctg

SEQ ID NO: 9771 - DNA, 27 bp, Unknown
  Description of Unknown: gRNA target site sequence
tttagagtctctcagctggtacacggc

SEQ ID NO: 9772 - DNA, 27 bp, Unknown
  Description of Unknown: gRNA target site sequence
tttgagaatcaaaatcggtgaataggc

SEQ ID NO: 9773 - DNA, 27 bp, Unknown
  Description of Unknown: gRNA target site sequence
tttgtttgagaatcaaaatcggtgaat

SEQ ID NO: 9774 - DNA, 27 bp, Unknown
  Description of Unknown: gRNA target site sequence
tttgattctcaaacaaatgtgtcacaa

SEQ ID NO: 9775 - DNA, 27 bp, Unknown
  Description of Unknown: gRNA target site sequence
tttgtgacacatttgtttgagaatcaa

SEQ ID NO: 9776 - DNA, 27 bp, Unknown
  Description of Unknown: gRNA target site sequence
tttgtctgtgatatacacatcagaatc

SEQ ID NO: 9777 - DNA, 27 bp, Unknown
  Description of Unknown: gRNA target site sequence
tttgttgctccaggccacagcactgtt

SEQ ID NO: 9778 - DNA, 27 bp, Unknown
  Description of Unknown: gRNA target site sequence
tttgcacatgcaaagtcagatttgttg

SEQ ID NO: 9779 - DNA, 27 bp, Unknown
  Description of Unknown: gRNA target site sequence
tttgcatgtgcaaacgccttcaacaac

SEQ ID NO: 9780 - DNA, 27 bp, Unknown
  Description of Unknown: gRNA target site sequence
tttggtgccttcgcaggctgtttcctt

SEQ ID NO: 9781 - DNA, 27 bp, Unknown
  Description of Unknown: gRNA target site sequence
tttccttgcttcaggaatggccaggtt

SEQ ID NO: 9782 - DNA, 27 bp, Unknown
  Description of Unknown: gRNA target site sequence
tttagacatcattgaccagagctctgg

SEQ ID NO: 9783 - DNA, 27 bp, Unknown
  Description of Unknown: gRNA target site sequence
tttggtggcaatggataaggccgagac

SEQ ID NO: 9784 - DNA, 27 bp, Unknown
  Description of Unknown: gRNA target site sequence
tttcttagtaaaaagagggttttggtg

SEQ ID NO: 9785 - DNA, 27 bp, Unknown
  Description of Unknown: gRNA target site sequence
tttactaagaaacagtgagccttgttc

SEQ ID NO: 9786 - DNA, 27 bp, Unknown
  Description of Unknown: gRNA target site sequence
tttcccgtgtcattctctggactgcca

SEQ ID NO: 9787 - DNA, 27 bp, Unknown
  Description of Unknown: gRNA target site sequence
tttgctcagactgtttgccccttactg

SEQ ID NO: 9788 - DNA, 27 bp, Unknown
  Description of Unknown: gRNA target site sequence
tttgccccttactgctcttctaggcct

SEQ ID NO: 9789 - DNA, 27 bp, Unknown
  Description of Unknown: gRNA target site sequence
tttggcagacagggagaaataaggaga

SEQ ID NO: 9790 - DNA, 27 bp, Unknown
  Description of Unknown: gRNA target site sequence
tttctccctgtctgccaaaaaatcttt

SEQ ID NO: 9791 - DNA, 27 bp, Unknown
  Description of Unknown: gRNA target site sequence
tttcccagctcactaagtcagtctcac

SEQ ID NO: 9792 - DNA, 27 bp, Unknown
  Description of Unknown: gRNA target site sequence
tttaattcctccacttcaacacctggt

SEQ ID NO: 9793 - DNA, 27 bp, Unknown
  Description of Unknown: gRNA target site sequence
tttcccagctgacagatgggctccccc

SEQ ID NO: 9794 - DNA, 27 bp, Unknown
  Description of Unknown: gRNA target site sequence
tttggacttttcccagctgacagatgg

SEQ ID NO: 9795 - DNA, 27 bp, Unknown
  Description of Unknown: gRNA target site sequence
tttctcaaccctgagttaaaacacatt

SEQ ID NO: 9796 - DNA, 27 bp, Unknown
  Description of Unknown: gRNA target site sequence
tttaactcagggttgagaaaacagcca

SEQ ID NO: 9797 - DNA, 27 bp, Unknown
  Description of Unknown: gRNA target site sequence
tttgtcctgaaggtggctgttttctca

SEQ ID NO: 9798 - DNA, 20 bp, Unknown
  Description of Unknown: gRNA target site sequence
ctaaaatgtctccctcatcc

SEQ ID NO: 9799 - DNA, 20 bp, Unknown
  Description of Unknown: gRNA target site sequence
ccagattccccttcattcct

SEQ ID NO: 9800 - DNA, 20 bp, Unknown
  Description of Unknown: gRNA target site sequence
cccttcattcctgagcacct

SEQ ID NO: 9801 - DNA, 20 bp, Unknown
  Description of Unknown: gRNA target site sequence
attcctgagcaccttagatt

SEQ ID NO: 9802 - DNA, 20 bp, Unknown
  Description of Unknown: gRNA target site sequence
tttggtataaataacctgct

SEQ ID NO: 9803 - DNA, 20 bp, Unknown
  Description of Unknown: gRNA target site sequence
ttggtataaataacctgctt

SEQ ID NO: 9804 - DNA, 20 bp, Unknown
  Description of Unknown: gRNA target site sequence
ggtataaataacctgcttgg

SEQ ID NO: 9805 - DNA, 20 bp, Unknown
  Description of Unknown: gRNA target site sequence
gtataaataacctgcttggg

SEQ ID NO: 9806 - DNA, 20 bp, Unknown
  Description of Unknown: gRNA target site sequence
tataaataacctgcttggga

SEQ ID NO: 9807 - DNA, 20 bp, Unknown
  Description of Unknown: gRNA target site sequence
ataaataacctgcttgggag

SEQ ID NO: 9808 - DNA, 20 bp, Unknown
  Description of Unknown: gRNA target site sequence
taaataacctgcttgggagg

SEQ ID NO: 9809 - DNA, 20 bp, Unknown
  Description of Unknown: gRNA target site sequence
tacataatttaaccttcaca

SEQ ID NO: 9810 - DNA, 20 bp, Unknown
  Description of Unknown: gRNA target site sequence
accttcacacagtttctgca

SEQ ID NO: 9811 - DNA, 20 bp, Unknown
  Description of Unknown: gRNA target site sequence
tcacacagtttctgcaaagt

SEQ ID NO: 9812 - DNA, 20 bp, Unknown
  Description of Unknown: gRNA target site sequence
cagtttctgcaaagtcagaa

SEQ ID NO: 9813 - DNA, 20 bp, Unknown
  Description of Unknown: gRNA target site sequence
ggtgattattacctcacatg

SEQ ID NO: 9814 - DNA, 20 bp, Unknown
  Description of Unknown: gRNA target site sequence
attacctcacatgcagaaaa

SEQ ID NO: 9815 - DNA, 20 bp, Unknown
  Description of Unknown: gRNA target site sequence
tcacatgcagaaaaaagtga

SEQ ID NO: 9816 - DNA, 20 bp, Unknown
  Description of Unknown: gRNA target site sequence
cacatgcagaaaaaagtgat

SEQ ID NO: 9817 - DNA, 20 bp, Unknown
  Description of Unknown: gRNA target site sequence
gataggaatttctgtcttaa

SEQ ID NO: 9818 - DNA, 20 bp, Unknown
  Description of Unknown: gRNA target site sequence
ttctgtcttaaaagtcttgt

SEQ ID NO: 9819 - DNA, 20 bp, Unknown
  Description of Unknown: gRNA target site sequence
tgtcttaaaagtcttgttgg

SEQ ID NO: 9820 - DNA, 20 bp, Unknown
  Description of Unknown: gRNA target site sequence
aaaagtcttgttggtggaca

SEQ ID NO: 9821 - DNA, 20 bp, Unknown
  Description of Unknown: gRNA target site sequence
aaagtcttgttggtggacaa

SEQ ID NO: 9822 - DNA, 20 bp, Unknown
  Description of Unknown: gRNA target site sequence
gtcttgttggtggacaaagg

SEQ ID NO: 9823 - DNA, 20 bp, Unknown
  Description of Unknown: gRNA target site sequence
ttggtggacaaaggaagttc

SEQ ID NO: 9824 - DNA, 20 bp, Unknown
  Description of Unknown: gRNA target site sequence
tggtggacaaaggaagttct

SEQ ID NO: 9825 - DNA, 20 bp, Unknown
  Description of Unknown: gRNA target site sequence
acaaaggaagttctaggatt

SEQ ID NO: 9826 - DNA, 20 bp, Unknown
  Description of Unknown: gRNA target site sequence
ggatttggatcttgtttttt

SEQ ID NO: 9827 - DNA, 20 bp, Unknown
  Description of Unknown: gRNA target site sequence
gatttggatcttgttttttt

SEQ ID NO: 9828 - DNA, 20 bp, Unknown
  Description of Unknown: gRNA target site sequence
tgggttccaatcccttgctc

SEQ ID NO: 9829 - DNA, 20 bp, Unknown
  Description of Unknown: gRNA target site sequence
taaaaaactaccacataaaa

SEQ ID NO: 9830 - DNA, 20 bp, Unknown
  Description of Unknown: gRNA target site sequence
aaactaccacataaaatggt

SEQ ID NO: 9831 - DNA, 20 bp, Unknown
  Description of Unknown: gRNA target site sequence
ctaccacataaaatggtgag

SEQ ID NO: 9832 - DNA, 20 bp, Unknown
  Description of Unknown: gRNA target site sequence
ccacataaaatggtgagaag

SEQ ID NO: 9833 - DNA, 20 bp, Unknown
  Description of Unknown: gRNA target site sequence
cacataaaatggtgagaagt

SEQ ID NO: 9834 - DNA, 20 bp, Unknown
  Description of Unknown: gRNA target site sequence
ataaaatggtgagaagtagg

SEQ ID NO: 9835 - DNA, 20 bp, Unknown
  Description of Unknown: gRNA target site sequence
taaaatggtgagaagtaggt

SEQ ID NO: 9836 - DNA, 20 bp, Unknown
  Description of Unknown: gRNA target site sequence
atggtgagaagtaggtaggc

SEQ ID NO: 9837 - DNA, 20 bp, Unknown
  Description of Unknown: gRNA target site sequence
ggtaggcaagtttttattga

SEQ ID NO: 9838 - DNA, 20 bp, Unknown
  Description of Unknown: gRNA target site sequence
taggcaagtttttattgata

SEQ ID NO: 9839 - DNA, 20 bp, Unknown
  Description of Unknown: gRNA target site sequence
ggcaagtttttattgataga

SEQ ID NO: 9840 - DNA, 20 bp, Unknown
  Description of Unknown: gRNA target site sequence
gcaagtttttattgatagag

SEQ ID NO: 9841 - DNA, 20 bp, Unknown
  Description of Unknown: gRNA target site sequence
atagagaggaaatcaaataa

SEQ ID NO: 9842 - DNA, 20 bp, Unknown
  Description of Unknown: gRNA target site sequence
ggaaatcaaataatggcaat

SEQ ID NO: 9843 - DNA, 20 bp, Unknown
  Description of Unknown: gRNA target site sequence
gaaatcaaataatggcaatg

SEQ ID NO: 9844 - DNA, 20 bp, Unknown
  Description of Unknown: gRNA target site sequence
aatcaaataatggcaatgag

SEQ ID NO: 9845 - DNA, 20 bp, Unknown
  Description of Unknown: gRNA target site sequence
ggcaatgaggagacatcacc

SEQ ID NO: 9846 - DNA, 20 bp, Unknown
  Description of Unknown: gRNA target site sequence
ggagacatcacctggaatgt

SEQ ID NO: 9847 - DNA, 20 bp, Unknown
  Description of Unknown: gRNA target site sequence
gagacatcacctggaatgtt

SEQ ID NO: 9848 - DNA, 20 bp, Unknown
  Description of Unknown: gRNA target site sequence
acatcacctggaatgttagg

SEQ ID NO: 9849 - DNA, 20 bp, Unknown
  Description of Unknown: gRNA target site sequence
aatgttaggcagtgcctaac

SEQ ID NO: 9850 - DNA, 20 bp, Unknown
  Description of Unknown: gRNA target site sequence
atgttaggcagtgcctaact

SEQ ID NO: 9851 - DNA, 20 bp, Unknown
  Description of Unknown: gRNA target site sequence
tgttaggcagtgcctaactg

SEQ ID NO: 9852 - DNA, 20 bp, Unknown
  Description of Unknown: gRNA target site sequence
gttaggcagtgcctaactgg

SEQ ID NO: 9853 - DNA, 20 bp, Unknown
  Description of Unknown: gRNA target site sequence
ggcagtgcctaactggggga

SEQ ID NO: 9854 - DNA, 20 bp, Unknown
  Description of Unknown: gRNA target site sequence
gtgcctaactgggggatgga

SEQ ID NO: 9855 - DNA, 20 bp, Unknown
  Description of Unknown: gRNA target site sequence
actgggggatggacagacaa

SEQ ID NO: 9856 - DNA, 20 bp, Unknown
  Description of Unknown: gRNA target site sequence
ctgggggatggacagacaat

SEQ ID NO: 9857 - DNA, 20 bp, Unknown
  Description of Unknown: gRNA target site sequence
ggggatggacagacaatggg

SEQ ID NO: 9858 - DNA, 20 bp, Unknown
  Description of Unknown: gRNA target site sequence
caatgggcagtgccaaccca

SEQ ID NO: 9859 - DNA, 20 bp, Unknown
  Description of Unknown: gRNA target site sequence
aatgggcagtgccaacccat

SEQ ID NO: 9860 - DNA, 20 bp, Unknown
  Description of Unknown: gRNA target site sequence
atgggcagtgccaacccata

SEQ ID NO: 9861 - DNA, 20 bp, Unknown
  Description of Unknown: gRNA target site sequence
ggcagtgccaacccataggg

SEQ ID NO: 9862 - DNA, 20 bp, Unknown
  Description of Unknown: gRNA target site sequence
aacccatagggtggatacaa

SEQ ID NO: 9863 - DNA, 20 bp, Unknown
  Description of Unknown: gRNA target site sequence
catagggtggatacaaaaga

SEQ ID NO: 9864 - DNA, 20 bp, Unknown
  Description of Unknown: gRNA target site sequence
atagggtggatacaaaagac

SEQ ID NO: 9865 - DNA, 20 bp, Unknown
  Description of Unknown: gRNA target site sequence
ggtggatacaaaagacaggc

SEQ ID NO: 9866 - DNA, 20 bp, Unknown
  Description of Unknown: gRNA target site sequence
gtggatacaaaagacaggca

SEQ ID NO: 9867 - DNA, 20 bp, Unknown
  Description of Unknown: gRNA target site sequence
gatacaaaagacaggcaagg

SEQ ID NO: 9868 - DNA, 20 bp, Unknown
  Description of Unknown: gRNA target site sequence
atacaaaagacaggcaagga

SEQ ID NO: 9869 - DNA, 20 bp, Unknown
  Description of Unknown: gRNA target site sequence
tacaaaagacaggcaaggaa

SEQ ID NO: 9870 - DNA, 20 bp, Unknown
  Description of Unknown: gRNA target site sequence
acaaaagacaggcaaggaag

SEQ ID NO: 9871 - DNA, 20 bp, Unknown
  Description of Unknown: gRNA target site sequence
aaagacaggcaaggaagggg

SEQ ID NO: 9872 - DNA, 20 bp, Unknown
  Description of Unknown: gRNA target site sequence
aggaaggggtagaaccatca

SEQ ID NO: 9873 - DNA, 20 bp, Unknown
  Description of Unknown: gRNA target site sequence
gaaggggtagaaccatcaaa

SEQ ID NO: 9874 - DNA, 20 bp, Unknown
  Description of Unknown: gRNA target site sequence
aaggggtagaaccatcaaag

SEQ ID NO: 9875 - DNA, 20 bp, Unknown
  Description of Unknown: gRNA target site sequence
gtagaaccatcaaagaggaa

SEQ ID NO: 9876 - DNA, 20 bp, Unknown
  Description of Unknown: gRNA target site sequence
tagaaccatcaaagaggaat

SEQ ID NO: 9877 - DNA, 20 bp, Unknown
  Description of Unknown: gRNA target site sequence
accatcaaagaggaataggc

SEQ ID NO: 9878 - DNA, 20 bp, Unknown
  Description of Unknown: gRNA target site sequence
ggaataggctggtgacccca

SEQ ID NO: 9879 - DNA, 20 bp, Unknown
  Description of Unknown: gRNA target site sequence
taggctggtgaccccaaagc

SEQ ID NO: 9880 - DNA, 20 bp, Unknown
  Description of Unknown: gRNA target site sequence
aggctggtgaccccaaagca

SEQ ID NO: 9881 - DNA, 20 bp, Unknown
  Description of Unknown: gRNA target site sequence
gctggtgaccccaaagcaag

SEQ ID NO: 9882 - DNA, 20 bp, Unknown
  Description of Unknown: gRNA target site sequence
ctggtgaccccaaagcaagg

SEQ ID NO: 9883 - DNA, 20 bp, Unknown
  Description of Unknown: gRNA target site sequence
accccaaagcaaggaggacc

SEQ ID NO: 9884 - DNA, 20 bp, Unknown
  Description of Unknown: gRNA target site sequence
aacataattgtgcttcatta

SEQ ID NO: 9885 - DNA, 20 bp, Unknown
  Description of Unknown: gRNA target site sequence
gcttcattatggtcctttcc

SEQ ID NO: 9886 - DNA, 20 bp, Unknown
  Description of Unknown: gRNA target site sequence
ccttctctctcacacataca

SEQ ID NO: 9887 - DNA, 20 bp, Unknown
  Description of Unknown: gRNA target site sequence
ttctctctcacacatacaca

SEQ ID NO: 9888 - DNA, 20 bp, Unknown
  Description of Unknown: gRNA target site sequence
cacatacacagagcccctac

SEQ ID NO: 9889 - DNA, 20 bp, Unknown
  Description of Unknown: gRNA target site sequence
acatacacagagcccctacc

SEQ ID NO: 9890 - DNA, 20 bp, Unknown
  Description of Unknown: gRNA target site sequence
cacagagcccctaccaggac

SEQ ID NO: 9891 - DNA, 20 bp, Unknown
  Description of Unknown: gRNA target site sequence
gagcccctaccaggaccaga

SEQ ID NO: 9892 - DNA, 20 bp, Unknown
  Description of Unknown: gRNA target site sequence
taccaggaccagacagctct

SEQ ID NO: 9893 - DNA, 20 bp, Unknown
  Description of Unknown: gRNA target site sequence
ccaggaccagacagctctta

SEQ ID NO: 9894 - DNA, 20 bp, Unknown
  Description of Unknown: gRNA target site sequence
gacagctcttagagcaaccc

SEQ ID NO: 9895 - DNA, 20 bp, Unknown
  Description of Unknown: gRNA target site sequence
cccattacctcttccctttc

SEQ ID NO: 9896 - DNA, 20 bp, Unknown
  Description of Unknown: gRNA target site sequence
cattacctcttccctttcca

SEQ ID NO: 9897 - DNA, 20 bp, Unknown
  Description of Unknown: gRNA target site sequence
attacctcttccctttccag

SEQ ID NO: 9898 - DNA, 20 bp, Unknown
  Description of Unknown: gRNA target site sequence
tgaaaaacgtgttcccaccc

SEQ ID NO: 9899 - DNA, 20 bp, Unknown
  Description of Unknown: gRNA target site sequence
gaaaaacgtgttcccacccg

SEQ ID NO: 9900 - DNA, 20 bp, Unknown
  Description of Unknown: gRNA target site sequence
cacccgaggtcgctgtgttt

SEQ ID NO: 9901 - DNA, 20 bp, Unknown
  Description of Unknown: gRNA target site sequence
ggtcgctgtgtttgagccat

SEQ ID NO: 9902 - DNA, 20 bp, Unknown
  Description of Unknown: gRNA target site sequence
cgctgtgtttgagccatcag

SEQ ID NO: 9903 - DNA, 20 bp, Unknown
  Description of Unknown: gRNA target site sequence
tgtgtttgagccatcagaag

SEQ ID NO: 9904 - DNA, 20 bp, Unknown
  Description of Unknown: gRNA target site sequence
tgtttgagccatcagaagca

SEQ ID NO: 9905 - DNA, 20 bp, Unknown
  Description of Unknown: gRNA target site sequence
cagagatctcccacacccaa

SEQ ID NO: 9906 - DNA, 20 bp, Unknown
  Description of Unknown: gRNA target site sequence
agagatctcccacacccaaa

SEQ ID NO: 9907 - DNA, 20 bp, Unknown
  Description of Unknown: gRNA target site sequence
ccacacccaaaaggccacac

SEQ ID NO: 9908 - DNA, 20 bp, Unknown
  Description of Unknown: gRNA target site sequence
aaaggccacactggtgtgcc

SEQ ID NO: 9909 - DNA, 20 bp, Unknown
  Description of Unknown: gRNA target site sequence
cacactggtgtgcctggcca

SEQ ID NO: 9910 - DNA, 20 bp, Unknown
  Description of Unknown: gRNA target site sequence
acactggtgtgcctggccac

SEQ ID NO: 9911 - DNA, 20 bp, Unknown
  Description of Unknown: gRNA target site sequence
aggcttctaccccgaccacg

SEQ ID NO: 9912 - DNA, 20 bp, Unknown
  Description of Unknown: gRNA target site sequence
gcttctaccccgaccacgtg

SEQ ID NO: 9913 - DNA, 20 bp, Unknown
  Description of Unknown: gRNA target site sequence
taccccgaccacgtggagct

SEQ ID NO: 9914 - DNA, 20 bp, Unknown
  Description of Unknown: gRNA target site sequence
ccgaccacgtggagctgagc

SEQ ID NO: 9915 - DNA, 20 bp, Unknown
  Description of Unknown: gRNA target site sequence
accacgtggagctgagctgg

SEQ ID NO: 9916 - DNA, 20 bp, Unknown
  Description of Unknown: gRNA target site sequence
ccacgtggagctgagctggt

SEQ ID NO: 9917 - DNA, 20 bp, Unknown
  Description of Unknown: gRNA target site sequence
gagctgagctggtgggtgaa

SEQ ID NO: 9918 - DNA, 20 bp, Unknown
  Description of Unknown: gRNA target site sequence
agctgagctggtgggtgaat

SEQ ID NO: 9919 - DNA, 20 bp, Unknown
  Description of Unknown: gRNA target site sequence
tgagctggtgggtgaatggg

SEQ ID NO: 9920 - DNA, 20 bp, Unknown
  Description of Unknown: gRNA target site sequence
gagctggtgggtgaatggga

SEQ ID NO: 9921 - DNA, 20 bp, Unknown
  Description of Unknown: gRNA target site sequence
gctggtgggtgaatgggaag

SEQ ID NO: 9922 - DNA, 20 bp, Unknown
  Description of Unknown: gRNA target site sequence
ctggtgggtgaatgggaagg

SEQ ID NO: 9923 - DNA, 20 bp, Unknown
  Description of Unknown: gRNA target site sequence
gtgaatgggaaggaggtgca

SEQ ID NO: 9924 - DNA, 20 bp, Unknown
  Description of Unknown: gRNA target site sequence
aatgggaaggaggtgcacag

SEQ ID NO: 9925 - DNA, 20 bp, Unknown
  Description of Unknown: gRNA target site sequence
atgggaaggaggtgcacagt

SEQ ID NO: 9926 - DNA, 20 bp, Unknown
  Description of Unknown: gRNA target site sequence
tgggaaggaggtgcacagtg

SEQ ID NO: 9927 - DNA, 20 bp, Unknown
  Description of Unknown: gRNA target site sequence
aaggaggtgcacagtggggt

SEQ ID NO: 9928 - DNA, 20 bp, Unknown
  Description of Unknown: gRNA target site sequence
ggtgcacagtggggtcagca

SEQ ID NO: 9929 - DNA, 20 bp, Unknown
  Description of Unknown: gRNA target site sequence
gtggggtcagcacagacccg

SEQ ID NO: 9930 - DNA, 20 bp, Unknown
  Description of Unknown: gRNA target site sequence
gcacagacccgcagcccctc

SEQ ID NO: 9931 - DNA, 20 bp, Unknown
  Description of Unknown: gRNA target site sequence
cacagacccgcagcccctca

SEQ ID NO: 9932 - DNA, 20 bp, Unknown
  Description of Unknown: gRNA target site sequence
cagacccgcagcccctcaag

SEQ ID NO: 9933 - DNA, 20 bp, Unknown
  Description of Unknown: gRNA target site sequence
acccgcagcccctcaaggag

SEQ ID NO: 9934 - DNA, 20 bp, Unknown
  Description of Unknown: gRNA target site sequence
cagcccgccctcaatgactc

SEQ ID NO: 9935 - DNA, 20 bp, Unknown
  Description of Unknown: gRNA target site sequence
aatgactccagatactgcct

SEQ ID NO: 9936 - DNA, 20 bp, Unknown
  Description of Unknown: gRNA target site sequence
gactccagatactgcctgag

SEQ ID NO: 9937 - DNA, 20 bp, Unknown
  Description of Unknown: gRNA target site sequence
tactgcctgagcagccgcct

SEQ ID NO: 9938 - DNA, 20 bp, Unknown
  Description of Unknown: gRNA target site sequence
actgcctgagcagccgcctg

SEQ ID NO: 9939 - DNA, 20 bp, Unknown
  Description of Unknown: gRNA target site sequence
ctgcctgagcagccgcctga

SEQ ID NO: 9940 - DNA, 20 bp, Unknown
  Description of Unknown: gRNA target site sequence
gagcagccgcctgagggtct

SEQ ID NO: 9941 - DNA, 20 bp, Unknown
  Description of Unknown: gRNA target site sequence
tgagggtctcggccaccttc

SEQ ID NO: 9942 - DNA, 20 bp, Unknown
  Description of Unknown: gRNA target site sequence
gggtctcggccaccttctgg

SEQ ID NO: 9943 - DNA, 20 bp, Unknown
  Description of Unknown: gRNA target site sequence
ccgcaaccacttccgctgtc

SEQ ID NO: 9944 - DNA, 20 bp, Unknown
  Description of Unknown: gRNA target site sequence
accacttccgctgtcaagtc

SEQ ID NO: 9945 - DNA, 20 bp, Unknown
  Description of Unknown: gRNA target site sequence
cgctgtcaagtccagttcta

SEQ ID NO: 9946 - DNA, 20 bp, Unknown
  Description of Unknown: gRNA target site sequence
gctgtcaagtccagttctac

SEQ ID NO: 9947 - DNA, 20 bp, Unknown
  Description of Unknown: gRNA target site sequence
agtccagttctacgggctct

SEQ ID NO: 9948 - DNA, 20 bp, Unknown
  Description of Unknown: gRNA target site sequence
tccagttctacgggctctcg

SEQ ID NO: 9949 - DNA, 20 bp, Unknown
  Description of Unknown: gRNA target site sequence
acgggctctcggagaatgac

SEQ ID NO: 9950 - DNA, 20 bp, Unknown
  Description of Unknown: gRNA target site sequence
ggctctcggagaatgacgag

SEQ ID NO: 9951 - DNA, 20 bp, Unknown
  Description of Unknown: gRNA target site sequence
cggagaatgacgagtggacc

SEQ ID NO: 9952 - DNA, 20 bp, Unknown
  Description of Unknown: gRNA target site sequence
ggagaatgacgagtggaccc

SEQ ID NO: 9953 - DNA, 20 bp, Unknown
  Description of Unknown: gRNA target site sequence
aatgacgagtggacccagga

SEQ ID NO: 9954 - DNA, 20 bp, Unknown
  Description of Unknown: gRNA target site sequence
atgacgagtggacccaggat

SEQ ID NO: 9955 - DNA, 20 bp, Unknown
  Description of Unknown: gRNA target site sequence
tgacgagtggacccaggata

SEQ ID NO: 9956 - DNA, 20 bp, Unknown
  Description of Unknown: gRNA target site sequence
atagggccaaacctgtcacc

SEQ ID NO: 9957 - DNA, 20 bp, Unknown
  Description of Unknown: gRNA target site sequence
aaacctgtcacccagatcgt

SEQ ID NO: 9958 - DNA, 20 bp, Unknown
  Description of Unknown: gRNA target site sequence
tcacccagatcgtcagcgcc

SEQ ID NO: 9959 - DNA, 20 bp, Unknown
  Description of Unknown: gRNA target site sequence
cacccagatcgtcagcgccg

SEQ ID NO: 9960 - DNA, 20 bp, Unknown
  Description of Unknown: gRNA target site sequence
agatcgtcagcgccgaggcc

SEQ ID NO: 9961 - DNA, 20 bp, Unknown
  Description of Unknown: gRNA target site sequence
gatcgtcagcgccgaggcct

SEQ ID NO: 9962 - DNA, 20 bp, Unknown
  Description of Unknown: gRNA target site sequence
atcgtcagcgccgaggcctg

SEQ ID NO: 9963 - DNA, 20 bp, Unknown
  Description of Unknown: gRNA target site sequence
gtcagcgccgaggcctgggg

SEQ ID NO: 9964 - DNA, 20 bp, Unknown
  Description of Unknown: gRNA target site sequence
cagcgccgaggcctggggta

SEQ ID NO: 9965 - DNA, 20 bp, Unknown
  Description of Unknown: gRNA target site sequence
cgccgaggcctggggtagag

SEQ ID NO: 9966 - DNA, 20 bp, Unknown
  Description of Unknown: gRNA target site sequence
gccgaggcctggggtagagc

SEQ ID NO: 9967 - DNA, 20 bp, Unknown
  Description of Unknown: gRNA target site sequence
aggcctggggtagagcaggt

SEQ ID NO: 9968 - DNA, 20 bp, Unknown
  Description of Unknown: gRNA target site sequence
cctggggtagagcaggtgag

SEQ ID NO: 9969 - DNA, 20 bp, Unknown
  Description of Unknown: gRNA target site sequence
ctggggtagagcaggtgagt

SEQ ID NO: 9970 - DNA, 20 bp, Unknown
  Description of Unknown: gRNA target site sequence
tggggtagagcaggtgagtg

SEQ ID NO: 9971 - DNA, 20 bp, Unknown
  Description of Unknown: gRNA target site sequence
tagagcaggtgagtggggcc

SEQ ID NO: 9972 - DNA, 20 bp, Unknown
  Description of Unknown: gRNA target site sequence
agagcaggtgagtggggcct

SEQ ID NO: 9973 - DNA, 20 bp, Unknown
  Description of Unknown: gRNA target site sequence
gagcaggtgagtggggcctg

SEQ ID NO: 9974 - DNA, 20 bp, Unknown
  Description of Unknown: gRNA target site sequence
gcaggtgagtggggcctggg

SEQ ID NO: 9975 - DNA, 20 bp, Unknown
  Description of Unknown: gRNA target site sequence
gtggggcctggggagatgcc

SEQ ID NO: 9976 - DNA, 20 bp, Unknown
  Description of Unknown: gRNA target site sequence
ggggcctggggagatgcctg

SEQ ID NO: 9977 - DNA, 20 bp, Unknown
  Description of Unknown: gRNA target site sequence
gggcctggggagatgcctgg

SEQ ID NO: 9978 - DNA, 20 bp, Unknown
  Description of Unknown: gRNA target site sequence
gcctggggagatgcctggag

SEQ ID NO: 9979 - DNA, 20 bp, Unknown
  Description of Unknown: gRNA target site sequence
gggagatgcctggaggagat

SEQ ID NO: 9980 - DNA, 20 bp, Unknown
  Description of Unknown: gRNA target site sequence
ggagatgcctggaggagatt

SEQ ID NO: 9981 - DNA, 20 bp, Unknown
  Description of Unknown: gRNA target site sequence
atgcctggaggagattaggt

SEQ ID NO: 9982 - DNA, 20 bp, Unknown
  Description of Unknown: gRNA target site sequence
tggaggagattaggtgagac

SEQ ID NO: 9983 - DNA, 20 bp, Unknown
  Description of Unknown: gRNA target site sequence
gattaggtgagaccagctac

SEQ ID NO: 9984 - DNA, 20 bp, Unknown
  Description of Unknown: gRNA target site sequence
attaggtgagaccagctacc

SEQ ID NO: 9985 - DNA, 20 bp, Unknown
  Description of Unknown: gRNA target site sequence
ttaggtgagaccagctacca

SEQ ID NO: 9986 - DNA, 20 bp, Unknown
  Description of Unknown: gRNA target site sequence
agaccagctaccagggaaaa

SEQ ID NO: 9987 - DNA, 20 bp, Unknown
  Description of Unknown: gRNA target site sequence
cagctaccagggaaaatgga

SEQ ID NO: 9988 - DNA, 20 bp, Unknown
  Description of Unknown: gRNA target site sequence
ccagggaaaatggaaagatc

SEQ ID NO: 9989 - DNA, 20 bp, Unknown
  Description of Unknown: gRNA target site sequence
cagggaaaatggaaagatcc

SEQ ID NO: 9990 - DNA, 20 bp, Unknown
  Description of Unknown: gRNA target site sequence
ggaaaatggaaagatccagg

SEQ ID NO: 9991 - DNA, 20 bp, Unknown
  Description of Unknown: gRNA target site sequence
aaatggaaagatccaggtag

SEQ ID NO: 9992 - DNA, 20 bp, Unknown
  Description of Unknown: gRNA target site sequence
gaaagatccaggtagcggac

SEQ ID NO: 9993 - DNA, 20 bp, Unknown
  Description of Unknown: gRNA target site sequence
atccaggtagcggacaagac

SEQ ID NO: 9994 - DNA, 20 bp, Unknown
  Description of Unknown: gRNA target site sequence
gtagcggacaagactagatc

SEQ ID NO: 9995 - DNA, 20 bp, Unknown
  Description of Unknown: gRNA target site sequence
gcggacaagactagatccag

SEQ ID NO: 9996 - DNA, 20 bp, Unknown
  Description of Unknown: gRNA target site sequence
acaagactagatccagaaga

SEQ ID NO: 9997 - DNA, 20 bp, Unknown
  Description of Unknown: gRNA target site sequence
gactagatccagaagaaagc

SEQ ID NO: 9998 - DNA, 20 bp, Unknown
  Description of Unknown: gRNA target site sequence
ctagatccagaagaaagcca

SEQ ID NO: 9999 - DNA, 20 bp, Unknown
  Description of Unknown: gRNA target site sequence
gatccagaagaaagccagag

SEQ ID NO: 10000 - DNA, 20 bp, Unknown
  Description of Unknown: gRNA target site sequence
agaagaaagccagagtggac

SEQ ID NO: 10001 - DNA, 20 bp, Unknown
  Description of Unknown: gRNA target site sequence
gaagaaagccagagtggaca

SEQ ID NO: 10002 - DNA, 20 bp, Unknown
  Description of Unknown: gRNA target site sequence
gaaagccagagtggacaagg

SEQ ID NO: 10003 - DNA, 20 bp, Unknown
  Description of Unknown: gRNA target site sequence
aaagccagagtggacaaggt

SEQ ID NO: 10004 - DNA, 20 bp, Unknown
  Description of Unknown: gRNA target site sequence
gtggacaaggtgggatgatc

SEQ ID NO: 10005 - DNA, 20 bp, Unknown
  Description of Unknown: gRNA target site sequence
tggacaaggtgggatgatca

SEQ ID NO: 10006 - DNA, 20 bp, Unknown
  Description of Unknown: gRNA target site sequence
ggtgggatgatcaaggttca

SEQ ID NO: 10007 - DNA, 20 bp, Unknown
  Description of Unknown: gRNA target site sequence
gtgggatgatcaaggttcac

SEQ ID NO: 10008 - DNA, 20 bp, Unknown
  Description of Unknown: gRNA target site sequence
tgggatgatcaaggttcaca

SEQ ID NO: 10009 - DNA, 20 bp, Unknown
  Description of Unknown: gRNA target site sequence
atgatcaaggttcacagggt

SEQ ID NO: 10010 - DNA, 20 bp, Unknown
  Description of Unknown: gRNA target site sequence
caaggttcacagggtcagca

SEQ ID NO: 10011 - DNA, 20 bp, Unknown
  Description of Unknown: gRNA target site sequence
ttcacagggtcagcaaagca

SEQ ID NO: 10012 - DNA, 20 bp, Unknown
  Description of Unknown: gRNA target site sequence
cggtgtgcacttcccccacc

SEQ ID NO: 10013 - DNA, 20 bp, Unknown
  Description of Unknown: gRNA target site sequence
tgtgcacttcccccaccaag

SEQ ID NO: 10014 - DNA, 20 bp, Unknown
  Description of Unknown: gRNA target site sequence
acttcccccaccaagaagca

SEQ ID NO: 10015 - DNA, 20 bp, Unknown
  Description of Unknown: gRNA target site sequence
ttcccccaccaagaagcata

SEQ ID NO: 10016 - DNA, 20 bp, Unknown
  Description of Unknown: gRNA target site sequence
tcccccaccaagaagcatag

SEQ ID NO: 10017 - DNA, 20 bp, Unknown
  Description of Unknown: gRNA target site sequence
caagaagcatagaggctgaa

SEQ ID NO: 10018 - DNA, 20 bp, Unknown
  Description of Unknown: gRNA target site sequence
agaagcatagaggctgaatg

SEQ ID NO: 10019 - DNA, 20 bp, Unknown
  Description of Unknown: gRNA target site sequence
gaggctgaatggagcacctc

SEQ ID NO: 10020 - DNA, 20 bp, Unknown
  Description of Unknown: gRNA target site sequence
cctcaagctcattcttcctt

SEQ ID NO: 10021 - DNA, 20 bp, Unknown
  Description of Unknown: gRNA target site sequence
tccttcagatcctgacacct

SEQ ID NO: 10022 - DNA, 20 bp, Unknown
  Description of Unknown: gRNA target site sequence
cttcagatcctgacacctta

SEQ ID NO: 10023 - DNA, 20 bp, Unknown
  Description of Unknown: gRNA target site sequence
gatcctgacaccttagagct

SEQ ID NO: 10024 - DNA, 20 bp, Unknown
  Description of Unknown: gRNA target site sequence
caccttagagctaagctttc

SEQ ID NO: 10025 - DNA, 20 bp, Unknown
  Description of Unknown: gRNA target site sequence
ctaagctttcaagtctccct

SEQ ID NO: 10026 - DNA, 20 bp, Unknown
  Description of Unknown: gRNA target site sequence
taagctttcaagtctccctg

SEQ ID NO: 10027 - DNA, 20 bp, Unknown
  Description of Unknown: gRNA target site sequence
tttcaagtctccctgaggac

SEQ ID NO: 10028 - DNA, 20 bp, Unknown
  Description of Unknown: gRNA target site sequence
ctccctgaggaccagccata

SEQ ID NO: 10029 - DNA, 20 bp, Unknown
  Description of Unknown: gRNA target site sequence
tgaggaccagccatacagct

SEQ ID NO: 10030 - DNA, 20 bp, Unknown
  Description of Unknown: gRNA target site sequence
agccatacagctcagcatct

SEQ ID NO: 10031 - DNA, 20 bp, Unknown
  Description of Unknown: gRNA target site sequence
catacagctcagcatctgag

SEQ ID NO: 10032 - DNA, 20 bp, Unknown
  Description of Unknown: gRNA target site sequence
gtgtgcatcccattctcttc

SEQ ID NO: 10033 - DNA, 20 bp, Unknown
  Description of Unknown: gRNA target site sequence
tgtgcatcccattctcttct

SEQ ID NO: 10034 - DNA, 20 bp, Unknown
  Description of Unknown: gRNA target site sequence
gtgcatcccattctcttctg

SEQ ID NO: 10035 - DNA, 20 bp, Unknown
  Description of Unknown: gRNA target site sequence
cccattctcttctggggtcc

SEQ ID NO: 10036 - DNA, 20 bp, Unknown
  Description of Unknown: gRNA target site sequence
ttctggggtcctggtttcct

SEQ ID NO: 10037 - DNA, 20 bp, Unknown
  Description of Unknown: gRNA target site sequence
gtcctggtttcctaagatca

SEQ ID NO: 10038 - DNA, 20 bp, Unknown
  Description of Unknown: gRNA target site sequence
gatcatagtgaccacttcgc

SEQ ID NO: 10039 - DNA, 20 bp, Unknown
  Description of Unknown: gRNA target site sequence
agtgaccacttcgctggcac

SEQ ID NO: 10040 - DNA, 20 bp, Unknown
  Description of Unknown: gRNA target site sequence
tgaccacttcgctggcactg

SEQ ID NO: 10041 - DNA, 20 bp, Unknown
  Description of Unknown: gRNA target site sequence
ccacttcgctggcactggag

SEQ ID NO: 10042 - DNA, 20 bp, Unknown
  Description of Unknown: gRNA target site sequence
cgctggcactggagcagcat

SEQ ID NO: 10043 - DNA, 20 bp, Unknown
  Description of Unknown: gRNA target site sequence
gctggcactggagcagcatg

SEQ ID NO: 10044 - DNA, 20 bp, Unknown
  Description of Unknown: gRNA target site sequence
ctggcactggagcagcatga

SEQ ID NO: 10045 - DNA, 20 bp, Unknown
  Description of Unknown: gRNA target site sequence
ggcactggagcagcatgagg

SEQ ID NO: 10046 - DNA, 20 bp, Unknown
  Description of Unknown: gRNA target site sequence
ctggagcagcatgagggaga

SEQ ID NO: 10047 - DNA, 20 bp, Unknown
  Description of Unknown: gRNA target site sequence
cagcatgagggagacagaac

SEQ ID NO: 10048 - DNA, 20 bp, Unknown
  Description of Unknown: gRNA target site sequence
agcatgagggagacagaacc

SEQ ID NO: 10049 - DNA, 20 bp, Unknown
  Description of Unknown: gRNA target site sequence
gcatgagggagacagaacca

SEQ ID NO: 10050 - DNA, 20 bp, Unknown
  Description of Unknown: gRNA target site sequence
agacagaaccagggctatca

SEQ ID NO: 10051 - DNA, 20 bp, Unknown
  Description of Unknown: gRNA target site sequence
gacagaaccagggctatcaa

SEQ ID NO: 10052 - DNA, 20 bp, Unknown
  Description of Unknown: gRNA target site sequence
cagaaccagggctatcaaag

SEQ ID NO: 10053 - DNA, 20 bp, Unknown
  Description of Unknown: gRNA target site sequence
agaaccagggctatcaaagg

SEQ ID NO: 10054 - DNA, 20 bp, Unknown
  Description of Unknown: gRNA target site sequence
atctgatatgcatgtgtttg

SEQ ID NO: 10055 - DNA, 20 bp, Unknown
  Description of Unknown: gRNA target site sequence
tgcatgtgtttgtggcctgt

SEQ ID NO: 10056 - DNA, 20 bp, Unknown
  Description of Unknown: gRNA target site sequence
ggcctgtgagtctgtgatgt

SEQ ID NO: 10057 - DNA, 20 bp, Unknown
  Description of Unknown: gRNA target site sequence
gcctgtgagtctgtgatgta

SEQ ID NO: 10058 - DNA, 20 bp, Unknown
  Description of Unknown: gRNA target site sequence
taaggctcaatgtccttaca

SEQ ID NO: 10059 - DNA, 20 bp, Unknown
  Description of Unknown: gRNA target site sequence
ggctcaatgtccttacaaag

SEQ ID NO: 10060 - DNA, 20 bp, Unknown
  Description of Unknown: gRNA target site sequence
tttcttcccctgttttcttt

SEQ ID NO: 10061 - DNA, 20 bp, Unknown
  Description of Unknown: gRNA target site sequence
ccctgttttctttcagactg

SEQ ID NO: 10062 - DNA, 20 bp, Unknown
  Description of Unknown: gRNA target site sequence
tcagactgtggcttcacctc

SEQ ID NO: 10063 - DNA, 20 bp, Unknown
  Description of Unknown: gRNA target site sequence
actgtggcttcacctccggt

SEQ ID NO: 10064 - DNA, 20 bp, Unknown
  Description of Unknown: gRNA target site sequence
tggcttcacctccggtaagt

SEQ ID NO: 10065 - DNA, 20 bp, Unknown
  Description of Unknown: gRNA target site sequence
cgccgtctctgctctcgaac

SEQ ID NO: 10066 - DNA, 20 bp, Unknown
  Description of Unknown: gRNA target site sequence
gccgtctctgctctcgaacc

SEQ ID NO: 10067 - DNA, 20 bp, Unknown
  Description of Unknown: gRNA target site sequence
ccgtctctgctctcgaacca

SEQ ID NO: 10068 - DNA, 20 bp, Unknown
  Description of Unknown: gRNA target site sequence
tctgctctcgaaccagggca

SEQ ID NO: 10069 - DNA, 20 bp, Unknown
  Description of Unknown: gRNA target site sequence
tgctctcgaaccagggcatg

SEQ ID NO: 10070 - DNA, 20 bp, Unknown
  Description of Unknown: gRNA target site sequence
accagggcatggagaatcca

SEQ ID NO: 10071 - DNA, 20 bp, Unknown
  Description of Unknown: gRNA target site sequence
gcatggagaatccacggaca

SEQ ID NO: 10072 - DNA, 20 bp, Unknown
  Description of Unknown: gRNA target site sequence
catggagaatccacggacac

SEQ ID NO: 10073 - DNA, 20 bp, Unknown
  Description of Unknown: gRNA target site sequence
atggagaatccacggacaca

SEQ ID NO: 10074 - DNA, 20 bp, Unknown
  Description of Unknown: gRNA target site sequence
tggagaatccacggacacag

SEQ ID NO: 10075 - DNA, 20 bp, Unknown
  Description of Unknown: gRNA target site sequence
atccacggacacaggggtgt

SEQ ID NO: 10076 - DNA, 20 bp, Unknown
  Description of Unknown: gRNA target site sequence
tccgtggattctccatgccc

SEQ ID NO: 10077 - DNA, 20 bp, Unknown
  Description of Unknown: gRNA target site sequence
gattctccatgccctggttc

SEQ ID NO: 10078 - DNA, 20 bp, Unknown
  Description of Unknown: gRNA target site sequence
ttctccatgccctggttcga

SEQ ID NO: 10079 - DNA, 20 bp, Unknown
  Description of Unknown: gRNA target site sequence
tccatgccctggttcgagag

SEQ ID NO: 10080 - DNA, 20 bp, Unknown
  Description of Unknown: gRNA target site sequence
catgccctggttcgagagca

SEQ ID NO: 10081 - DNA, 20 bp, Unknown
  Description of Unknown: gRNA target site sequence
ccctggttcgagagcagaga

SEQ ID NO: 10082 - DNA, 20 bp, Unknown
  Description of Unknown: gRNA target site sequence
ttcgagagcagagacggcga

SEQ ID NO: 10083 - DNA, 20 bp, Unknown
  Description of Unknown: gRNA target site sequence
agagcagagacggcgaaaga

SEQ ID NO: 10084 - DNA, 20 bp, Unknown
  Description of Unknown: gRNA target site sequence
agcagagacggcgaaagata

SEQ ID NO: 10085 - DNA, 20 bp, Unknown
  Description of Unknown: gRNA target site sequence
cagagacggcgaaagataga

SEQ ID NO: 10086 - DNA, 20 bp, Unknown
  Description of Unknown: gRNA target site sequence
cggcgaaagatagagagaaa

SEQ ID NO: 10087 - DNA, 20 bp, Unknown
  Description of Unknown: gRNA target site sequence
ggcgaaagatagagagaaaa

SEQ ID NO: 10088 - DNA, 20 bp, Unknown
  Description of Unknown: gRNA target site sequence
cgaaagatagagagaaaaag

SEQ ID NO: 10089 - DNA, 20 bp, Unknown
  Description of Unknown: gRNA target site sequence
aaagatagagagaaaaagga

SEQ ID NO: 10090 - DNA, 20 bp, Unknown
  Description of Unknown: gRNA target site sequence
aaaaggagagactcacttac

SEQ ID NO: 10091 - DNA, 20 bp, Unknown
  Description of Unknown: gRNA target site sequence
aaggagagactcacttaccg

SEQ ID NO: 10092 - DNA, 20 bp, Unknown
  Description of Unknown: gRNA target site sequence
aggagagactcacttaccgg

SEQ ID NO: 10093 - DNA, 20 bp, Unknown
  Description of Unknown: gRNA target site sequence
agactcacttaccggaggtg

SEQ ID NO: 10094 - DNA, 20 bp, Unknown
  Description of Unknown: gRNA target site sequence
acttaccggaggtgaagcca

SEQ ID NO: 10095 - DNA, 20 bp, Unknown
  Description of Unknown: gRNA target site sequence
gaggtgaagccacagtctga

SEQ ID NO: 10096 - DNA, 20 bp, Unknown
  Description of Unknown: gRNA target site sequence
agccacagtctgaaagaaaa

SEQ ID NO: 10097 - DNA, 20 bp, Unknown
  Description of Unknown: gRNA target site sequence
gccacagtctgaaagaaaac

SEQ ID NO: 10098 - DNA, 20 bp, Unknown
  Description of Unknown: gRNA target site sequence
ccacagtctgaaagaaaaca

SEQ ID NO: 10099 - DNA, 20 bp, Unknown
  Description of Unknown: gRNA target site sequence
cacagtctgaaagaaaacag

SEQ ID NO: 10100 - DNA, 20 bp, Unknown
  Description of Unknown: gRNA target site sequence
agtctgaaagaaaacagggg

SEQ ID NO: 10101 - DNA, 20 bp, Unknown
  Description of Unknown: gRNA target site sequence
agaaaacaggggaagaaaaa

SEQ ID NO: 10102 - DNA, 20 bp, Unknown
  Description of Unknown: gRNA target site sequence
acaggggaagaaaaatggat

SEQ ID NO: 10103 - DNA, 20 bp, Unknown
  Description of Unknown: gRNA target site sequence
aggggaagaaaaatggatga

SEQ ID NO: 10104 - DNA, 20 bp, Unknown
  Description of Unknown: gRNA target site sequence
atgagagaatgctgctttgt

SEQ ID NO: 10105 - DNA, 20 bp, Unknown
  Description of Unknown: gRNA target site sequence
tgagagaatgctgctttgta

SEQ ID NO: 10106 - DNA, 20 bp, Unknown
  Description of Unknown: gRNA target site sequence
tgctgctttgtaaggacatt

SEQ ID NO: 10107 - DNA, 20 bp, Unknown
  Description of Unknown: gRNA target site sequence
ggacattgagccttacatca

SEQ ID NO: 10108 - DNA, 20 bp, Unknown
  Description of Unknown: gRNA target site sequence
agccttacatcacagactca

SEQ ID NO: 10109 - DNA, 20 bp, Unknown
  Description of Unknown: gRNA target site sequence
gccttacatcacagactcac

SEQ ID NO: 10110 - DNA, 20 bp, Unknown
  Description of Unknown: gRNA target site sequence
ggccacaaacacatgcatat

SEQ ID NO: 10111 - DNA, 20 bp, Unknown
  Description of Unknown: gRNA target site sequence
acaaacacatgcatatcaga

SEQ ID NO: 10112 - DNA, 20 bp, Unknown
  Description of Unknown: gRNA target site sequence
catgcatatcagatagtaca

SEQ ID NO: 10113 - DNA, 20 bp, Unknown
  Description of Unknown: gRNA target site sequence
catatcagatagtacaaagt

SEQ ID NO: 10114 - DNA, 20 bp, Unknown
  Description of Unknown: gRNA target site sequence
acaaagtcagcctcctttga

SEQ ID NO: 10115 - DNA, 20 bp, Unknown
  Description of Unknown: gRNA target site sequence
tcagcctcctttgatagccc

SEQ ID NO: 10116 - DNA, 20 bp, Unknown
  Description of Unknown: gRNA target site sequence
ctgtctccctcatgctgctc

SEQ ID NO: 10117 - DNA, 20 bp, Unknown
  Description of Unknown: gRNA target site sequence
ccctcatgctgctccagtgc

SEQ ID NO: 10118 - DNA, 20 bp, Unknown
  Description of Unknown: gRNA target site sequence
atgctgctccagtgccagcg

SEQ ID NO: 10119 - DNA, 20 bp, Unknown
  Description of Unknown: gRNA target site sequence
ctgctccagtgccagcgaag

SEQ ID NO: 10120 - DNA, 20 bp, Unknown
  Description of Unknown: gRNA target site sequence
cgaagtggtcactatgatct

SEQ ID NO: 10121 - DNA, 20 bp, Unknown
  Description of Unknown: gRNA target site sequence
gaagtggtcactatgatctt

SEQ ID NO: 10122 - DNA, 20 bp, Unknown
  Description of Unknown: gRNA target site sequence
tcactatgatcttaggaaac

SEQ ID NO: 10123 - DNA, 20 bp, Unknown
  Description of Unknown: gRNA target site sequence
cactatgatcttaggaaacc

SEQ ID NO: 10124 - DNA, 20 bp, Unknown
  Description of Unknown: gRNA target site sequence
atcttaggaaaccaggaccc

SEQ ID NO: 10125 - DNA, 20 bp, Unknown
  Description of Unknown: gRNA target site sequence
ttaggaaaccaggaccccag

SEQ ID NO: 10126 - DNA, 20 bp, Unknown
  Description of Unknown: gRNA target site sequence
aggaaaccaggaccccagaa

SEQ ID NO: 10127 - DNA, 20 bp, Unknown
  Description of Unknown: gRNA target site sequence
accaggaccccagaagagaa

SEQ ID NO: 10128 - DNA, 20 bp, Unknown
  Description of Unknown: gRNA target site sequence
ccaggaccccagaagagaat

SEQ ID NO: 10129 - DNA, 20 bp, Unknown
  Description of Unknown: gRNA target site sequence
agaatgggatgcacaccact

SEQ ID NO: 10130 - DNA, 20 bp, Unknown
  Description of Unknown: gRNA target site sequence
atgcacaccactcagatgct

SEQ ID NO: 10131 - DNA, 20 bp, Unknown
  Description of Unknown: gRNA target site sequence
cactcagatgctgagctgta

SEQ ID NO: 10132 - DNA, 20 bp, Unknown
  Description of Unknown: gRNA target site sequence
cagatgctgagctgtatggc

SEQ ID NO: 10133 - DNA, 20 bp, Unknown
  Description of Unknown: gRNA target site sequence
tgagctgtatggctggtcct

SEQ ID NO: 10134 - DNA, 20 bp, Unknown
  Description of Unknown: gRNA target site sequence
gagctgtatggctggtcctc

SEQ ID NO: 10135 - DNA, 20 bp, Unknown
  Description of Unknown: gRNA target site sequence
agctgtatggctggtcctca

SEQ ID NO: 10136 - DNA, 20 bp, Unknown
  Description of Unknown: gRNA target site sequence
ctgtatggctggtcctcagg

SEQ ID NO: 10137 - DNA, 20 bp, Unknown
  Description of Unknown: gRNA target site sequence
tggtcctcagggagacttga

SEQ ID NO: 10138 - DNA, 20 bp, Unknown
  Description of Unknown: gRNA target site sequence
ctcagggagacttgaaagct

SEQ ID NO: 10139 - DNA, 20 bp, Unknown
  Description of Unknown: gRNA target site sequence
agacttgaaagcttagctct

SEQ ID NO: 10140 - DNA, 20 bp, Unknown
  Description of Unknown: gRNA target site sequence
gacttgaaagcttagctcta

SEQ ID NO: 10141 - DNA, 20 bp, Unknown
  Description of Unknown: gRNA target site sequence
aaagcttagctctaaggtgt

SEQ ID NO: 10142 - DNA, 20 bp, Unknown
  Description of Unknown: gRNA target site sequence
aagcttagctctaaggtgtc

SEQ ID NO: 10143 - DNA, 20 bp, Unknown
  Description of Unknown: gRNA target site sequence
ctctaaggtgtcaggatctg

SEQ ID NO: 10144 - DNA, 20 bp, Unknown
  Description of Unknown: gRNA target site sequence
tctaaggtgtcaggatctga

SEQ ID NO: 10145 - DNA, 20 bp, Unknown
  Description of Unknown: gRNA target site sequence
aaggtgtcaggatctgaagg

SEQ ID NO: 10146 - DNA, 20 bp, Unknown
  Description of Unknown: gRNA target site sequence
tcaggatctgaaggaagaat

SEQ ID NO: 10147 - DNA, 20 bp, Unknown
  Description of Unknown: gRNA target site sequence
tctgaaggaagaatgagctt

SEQ ID NO: 10148 - DNA, 20 bp, Unknown
  Description of Unknown: gRNA target site sequence
ctgaaggaagaatgagcttg

SEQ ID NO: 10149 - DNA, 20 bp, Unknown
  Description of Unknown: gRNA target site sequence
tgagcttgaggtgctccatt

SEQ ID NO: 10150 - DNA, 20 bp, Unknown
  Description of Unknown: gRNA target site sequence
cattcagcctctatgcttct

SEQ ID NO: 10151 - DNA, 20 bp, Unknown
  Description of Unknown: gRNA target site sequence
tcagcctctatgcttcttgg

SEQ ID NO: 10152 - DNA, 20 bp, Unknown
  Description of Unknown: gRNA target site sequence
cagcctctatgcttcttggt

SEQ ID NO: 10153 - DNA, 20 bp, Unknown
  Description of Unknown: gRNA target site sequence
agcctctatgcttcttggtg

SEQ ID NO: 10154 - DNA, 20 bp, Unknown
  Description of Unknown: gRNA target site sequence
gcctctatgcttcttggtgg

SEQ ID NO: 10155 - DNA, 20 bp, Unknown
  Description of Unknown: gRNA target site sequence
tctatgcttcttggtggggg

SEQ ID NO: 10156 - DNA, 20 bp, Unknown
  Description of Unknown: gRNA target site sequence
tcatcccaccttgtccactc

SEQ ID NO: 10157 - DNA, 20 bp, Unknown
  Description of Unknown: gRNA target site sequence
tgtccactctggctttcttc

SEQ ID NO: 10158 - DNA, 20 bp, Unknown
  Description of Unknown: gRNA target site sequence
ctctggctttcttctggatc

SEQ ID NO: 10159 - DNA, 20 bp, Unknown
  Description of Unknown: gRNA target site sequence
atctagtcttgtccgctacc

SEQ ID NO: 10160 - DNA, 20 bp, Unknown
  Description of Unknown: gRNA target site sequence
ctggatctttccattttccc

SEQ ID NO: 10161 - DNA, 20 bp, Unknown
  Description of Unknown: gRNA target site sequence
gatctttccattttccctgg

SEQ ID NO: 10162 - DNA, 20 bp, Unknown
  Description of Unknown: gRNA target site sequence
tttccattttccctggtagc

SEQ ID NO: 10163 - DNA, 20 bp, Unknown
  Description of Unknown: gRNA target site sequence
tggtctcacctaatctcctc

SEQ ID NO: 10164 - DNA, 20 bp, Unknown
  Description of Unknown: gRNA target site sequence
ggtctcacctaatctcctcc

SEQ ID NO: 10165 - DNA, 20 bp, Unknown
  Description of Unknown: gRNA target site sequence
atctcctccaggcatctccc

SEQ ID NO: 10166 - DNA, 20 bp, Unknown
  Description of Unknown: gRNA target site sequence
tctcctccaggcatctcccc

SEQ ID NO: 10167 - DNA, 20 bp, Unknown
  Description of Unknown: gRNA target site sequence
cccactcacctgctctaccc

SEQ ID NO: 10168 - DNA, 20 bp, Unknown
  Description of Unknown: gRNA target site sequence
ccactcacctgctctacccc

SEQ ID NO: 10169 - DNA, 20 bp, Unknown
  Description of Unknown: gRNA target site sequence
acctgctctaccccaggcct

SEQ ID NO: 10170 - DNA, 20 bp, Unknown
  Description of Unknown: gRNA target site sequence
aggcctcggcgctgacgatc

SEQ ID NO: 10171 - DNA, 20 bp, Unknown
  Description of Unknown: gRNA target site sequence
ggcctcggcgctgacgatct

SEQ ID NO: 10172 - DNA, 20 bp, Unknown
  Description of Unknown: gRNA target site sequence
ggcgctgacgatctgggtga

SEQ ID NO: 10173 - DNA, 20 bp, Unknown
  Description of Unknown: gRNA target site sequence
gcgctgacgatctgggtgac

SEQ ID NO: 10174 - DNA, 20 bp, Unknown
  Description of Unknown: gRNA target site sequence
gacgatctgggtgacaggtt

SEQ ID NO: 10175 - DNA, 20 bp, Unknown
  Description of Unknown: gRNA target site sequence
tgacaggtttggccctatcc

SEQ ID NO: 10176 - DNA, 20 bp, Unknown
  Description of Unknown: gRNA target site sequence
gacaggtttggccctatcct

SEQ ID NO: 10177 - DNA, 20 bp, Unknown
  Description of Unknown: gRNA target site sequence
gggtccactcgtcattctcc

SEQ ID NO: 10178 - DNA, 20 bp, Unknown
  Description of Unknown: gRNA target site sequence
gtccactcgtcattctccga

SEQ ID NO: 10179 - DNA, 20 bp, Unknown
  Description of Unknown: gRNA target site sequence
cgtcattctccgagagcccg

SEQ ID NO: 10180 - DNA, 20 bp, Unknown
  Description of Unknown: gRNA target site sequence
tctccgagagcccgtagaac

SEQ ID NO: 10181 - DNA, 20 bp, Unknown
  Description of Unknown: gRNA target site sequence
gcccgtagaactggacttga

SEQ ID NO: 10182 - DNA, 20 bp, Unknown
  Description of Unknown: gRNA target site sequence
cgtagaactggacttgacag

SEQ ID NO: 10183 - DNA, 20 bp, Unknown
  Description of Unknown: gRNA target site sequence
agaactggacttgacagcgg

SEQ ID NO: 10184 - DNA, 20 bp, Unknown
  Description of Unknown: gRNA target site sequence
actggacttgacagcggaag

SEQ ID NO: 10185 - DNA, 20 bp, Unknown
  Description of Unknown: gRNA target site sequence
cttgacagcggaagtggttg

SEQ ID NO: 10186 - DNA, 20 bp, Unknown
  Description of Unknown: gRNA target site sequence
ttgacagcggaagtggttgc

SEQ ID NO: 10187 - DNA, 20 bp, Unknown
  Description of Unknown: gRNA target site sequence
tgacagcggaagtggttgcg

SEQ ID NO: 10188 - DNA, 20 bp, Unknown
  Description of Unknown: gRNA target site sequence
gacagcggaagtggttgcgg

SEQ ID NO: 10189 - DNA, 20 bp, Unknown
  Description of Unknown: gRNA target site sequence
agtggttgcgggggttctgc

SEQ ID NO: 10190 - DNA, 20 bp, Unknown
  Description of Unknown: gRNA target site sequence
ggttgcgggggttctgccag

SEQ ID NO: 10191 - DNA, 20 bp, Unknown
  Description of Unknown: gRNA target site sequence
gttgcgggggttctgccaga

SEQ ID NO: 10192 - DNA, 20 bp, Unknown
  Description of Unknown: gRNA target site sequence
gcgggggttctgccagaagg

SEQ ID NO: 10193 - DNA, 20 bp, Unknown
  Description of Unknown: gRNA target site sequence
ggttctgccagaaggtggcc

SEQ ID NO: 10194 - DNA, 20 bp, Unknown
  Description of Unknown: gRNA target site sequence
cagaaggtggccgagaccct

SEQ ID NO: 10195 - DNA, 20 bp, Unknown
  Description of Unknown: gRNA target site sequence
agaaggtggccgagaccctc

SEQ ID NO: 10196 - DNA, 20 bp, Unknown
  Description of Unknown: gRNA target site sequence
aggtggccgagaccctcagg

SEQ ID NO: 10197 - DNA, 20 bp, Unknown
  Description of Unknown: gRNA target site sequence
gagaccctcaggcggctgct

SEQ ID NO: 10198 - DNA, 20 bp, Unknown
  Description of Unknown: gRNA target site sequence
agaccctcaggcggctgctc

SEQ ID NO: 10199 - DNA, 20 bp, Unknown
  Description of Unknown: gRNA target site sequence
ccctcaggcggctgctcagg

SEQ ID NO: 10200 - DNA, 20 bp, Unknown
  Description of Unknown: gRNA target site sequence
gcggctgctcaggcagtatc

SEQ ID NO: 10201 - DNA, 20 bp, Unknown
  Description of Unknown: gRNA target site sequence
ggctgctcaggcagtatctg

SEQ ID NO: 10202 - DNA, 20 bp, Unknown
  Description of Unknown: gRNA target site sequence
aggcagtatctggagtcatt

SEQ ID NO: 10203 - DNA, 20 bp, Unknown
  Description of Unknown: gRNA target site sequence
ggcagtatctggagtcattg

SEQ ID NO: 10204 - DNA, 20 bp, Unknown
  Description of Unknown: gRNA target site sequence
gcagtatctggagtcattga

SEQ ID NO: 10205 - DNA, 20 bp, Unknown
  Description of Unknown: gRNA target site sequence
gtatctggagtcattgaggg

SEQ ID NO: 10206 - DNA, 20 bp, Unknown
  Description of Unknown: gRNA target site sequence
tatctggagtcattgagggc

SEQ ID NO: 10207 - DNA, 20 bp, Unknown
  Description of Unknown: gRNA target site sequence
ttgagggcgggctgctcctt

SEQ ID NO: 10208 - DNA, 20 bp, Unknown
  Description of Unknown: gRNA target site sequence
tgagggcgggctgctccttg

SEQ ID NO: 10209 - DNA, 20 bp, Unknown
  Description of Unknown: gRNA target site sequence
gagggcgggctgctccttga

SEQ ID NO: 10210 - DNA, 20 bp, Unknown
  Description of Unknown: gRNA target site sequence
agggcgggctgctccttgag

SEQ ID NO: 10211 - DNA, 20 bp, Unknown
  Description of Unknown: gRNA target site sequence
ggctgctccttgaggggctg

SEQ ID NO: 10212 - DNA, 20 bp, Unknown
  Description of Unknown: gRNA target site sequence
gctgctccttgaggggctgc

SEQ ID NO: 10213 - DNA, 20 bp, Unknown
  Description of Unknown: gRNA target site sequence
cctccttcccattcacccac

SEQ ID NO: 10214 - DNA, 20 bp, Unknown
  Description of Unknown: gRNA target site sequence
ttcccattcacccaccagct

SEQ ID NO: 10215 - DNA, 20 bp, Unknown
  Description of Unknown: gRNA target site sequence
cccaccagctcagctccacg

SEQ ID NO: 10216 - DNA, 20 bp, Unknown
  Description of Unknown: gRNA target site sequence
ccagctcagctccacgtggt

SEQ ID NO: 10217 - DNA, 20 bp, Unknown
  Description of Unknown: gRNA target site sequence
cagctcagctccacgtggtc

SEQ ID NO: 10218 - DNA, 20 bp, Unknown
  Description of Unknown: gRNA target site sequence
agctcagctccacgtggtcg

SEQ ID NO: 10219 - DNA, 20 bp, Unknown
  Description of Unknown: gRNA target site sequence
tcagctccacgtggtcgggg

SEQ ID NO: 10220 - DNA, 20 bp, Unknown
  Description of Unknown: gRNA target site sequence
gctccacgtggtcggggtag

SEQ ID NO: 10221 - DNA, 20 bp, Unknown
  Description of Unknown: gRNA target site sequence
gtggtcggggtagaagcctg

SEQ ID NO: 10222 - DNA, 20 bp, Unknown
  Description of Unknown: gRNA target site sequence
tcggggtagaagcctgtggc

SEQ ID NO: 10223 - DNA, 20 bp, Unknown
  Description of Unknown: gRNA target site sequence
cggggtagaagcctgtggcc

SEQ ID NO: 10224 - DNA, 20 bp, Unknown
  Description of Unknown: gRNA target site sequence
aagcctgtggccaggcacac

SEQ ID NO: 10225 - DNA, 20 bp, Unknown
  Description of Unknown: gRNA target site sequence
tgtggccaggcacaccagtg

SEQ ID NO: 10226 - DNA, 20 bp, Unknown
  Description of Unknown: gRNA target site sequence
ggcacaccagtgtggccttt

SEQ ID NO: 10227 - DNA, 20 bp, Unknown
  Description of Unknown: gRNA target site sequence
gcacaccagtgtggcctttt

SEQ ID NO: 10228 - DNA, 20 bp, Unknown
  Description of Unknown: gRNA target site sequence
ccagtgtggccttttgggtg

SEQ ID NO: 10229 - DNA, 20 bp, Unknown
  Description of Unknown: gRNA target site sequence
cagtgtggccttttgggtgt

SEQ ID NO: 10230 - DNA, 20 bp, Unknown
  Description of Unknown: gRNA target site sequence
gtgtggccttttgggtgtgg

SEQ ID NO: 10231 - DNA, 20 bp, Unknown
  Description of Unknown: gRNA target site sequence
tgggagatctctgcttctga

SEQ ID NO: 10232 - DNA, 20 bp, Unknown
  Description of Unknown: gRNA target site sequence
tgcttctgatggctcaaaca

SEQ ID NO: 10233 - DNA, 20 bp, Unknown
  Description of Unknown: gRNA target site sequence
tggctcaaacacagcgacct

SEQ ID NO: 10234 - DNA, 20 bp, Unknown
  Description of Unknown: gRNA target site sequence
ggctcaaacacagcgacctc

SEQ ID NO: 10235 - DNA, 20 bp, Unknown
  Description of Unknown: gRNA target site sequence
tcaaacacagcgacctcggg

SEQ ID NO: 10236 - DNA, 20 bp, Unknown
  Description of Unknown: gRNA target site sequence
caaacacagcgacctcgggt

SEQ ID NO: 10237 - DNA, 20 bp, Unknown
  Description of Unknown: gRNA target site sequence
tcgggtgggaacacgttttt

SEQ ID NO: 10238 - DNA, 20 bp, Unknown
  Description of Unknown: gRNA target site sequence
cgggtgggaacacgtttttc

SEQ ID NO: 10239 - DNA, 20 bp, Unknown
  Description of Unknown: gRNA target site sequence
aacacgtttttcaggtcctc

SEQ ID NO: 10240 - DNA, 20 bp, Unknown
  Description of Unknown: gRNA target site sequence
cgtttttcaggtcctctgga

SEQ ID NO: 10241 - DNA, 20 bp, Unknown
  Description of Unknown: gRNA target site sequence
gtttttcaggtcctctggaa

SEQ ID NO: 10242 - DNA, 20 bp, Unknown
  Description of Unknown: gRNA target site sequence
tttttcaggtcctctggaaa

SEQ ID NO: 10243 - DNA, 20 bp, Unknown
  Description of Unknown: gRNA target site sequence
ttcaggtcctctggaaaggg

SEQ ID NO: 10244 - DNA, 20 bp, Unknown
  Description of Unknown: gRNA target site sequence
caggtcctctggaaagggaa

SEQ ID NO: 10245 - DNA, 20 bp, Unknown
  Description of Unknown: gRNA target site sequence
aggtcctctggaaagggaag

SEQ ID NO: 10246 - DNA, 20 bp, Unknown
  Description of Unknown: gRNA target site sequence
tctggaaagggaagaggtaa

SEQ ID NO: 10247 - DNA, 20 bp, Unknown
  Description of Unknown: gRNA target site sequence
ctggaaagggaagaggtaat

SEQ ID NO: 10248 - DNA, 20 bp, Unknown
  Description of Unknown: gRNA target site sequence
tggaaagggaagaggtaatg

SEQ ID NO: 10249 - DNA, 20 bp, Unknown
  Description of Unknown: gRNA target site sequence
aagggaagaggtaatggggc

SEQ ID NO: 10250 - DNA, 20 bp, Unknown
  Description of Unknown: gRNA target site sequence
agggaagaggtaatggggct

SEQ ID NO: 10251 - DNA, 20 bp, Unknown
  Description of Unknown: gRNA target site sequence
gggaagaggtaatggggcta

SEQ ID NO: 10252 - DNA, 20 bp, Unknown
  Description of Unknown: gRNA target site sequence
aatggggctagggttgctct

SEQ ID NO: 10253 - DNA, 20 bp, Unknown
  Description of Unknown: gRNA target site sequence
tggggctagggttgctctaa

SEQ ID NO: 10254 - DNA, 20 bp, Unknown
  Description of Unknown: gRNA target site sequence
gggttgctctaagagctgtc

SEQ ID NO: 10255 - DNA, 20 bp, Unknown
  Description of Unknown: gRNA target site sequence
ctctaagagctgtctggtcc

SEQ ID NO: 10256 - DNA, 20 bp, Unknown
  Description of Unknown: gRNA target site sequence
taagagctgtctggtcctgg

SEQ ID NO: 10257 - DNA, 20 bp, Unknown
  Description of Unknown: gRNA target site sequence
aagagctgtctggtcctggt

SEQ ID NO: 10258 - DNA, 20 bp, Unknown
  Description of Unknown: gRNA target site sequence
agagctgtctggtcctggta

SEQ ID NO: 10259 - DNA, 20 bp, Unknown
  Description of Unknown: gRNA target site sequence
gagctgtctggtcctggtag

SEQ ID NO: 10260 - DNA, 20 bp, Unknown
  Description of Unknown: gRNA target site sequence
taggggctctgtgtatgtgt

SEQ ID NO: 10261 - DNA, 20 bp, Unknown
  Description of Unknown: gRNA target site sequence
ggggctctgtgtatgtgtga

SEQ ID NO: 10262 - DNA, 20 bp, Unknown
  Description of Unknown: gRNA target site sequence
ggctctgtgtatgtgtgaga

SEQ ID NO: 10263 - DNA, 20 bp, Unknown
  Description of Unknown: gRNA target site sequence
tctgtgtatgtgtgagagag

SEQ ID NO: 10264 - DNA, 20 bp, Unknown
  Description of Unknown: gRNA target site sequence
ctgtgtatgtgtgagagaga

SEQ ID NO: 10265 - DNA, 20 bp, Unknown
  Description of Unknown: gRNA target site sequence
gtatgtgtgagagagaaggc

SEQ ID NO: 10266 - DNA, 20 bp, Unknown
  Description of Unknown: gRNA target site sequence
tatgtgtgagagagaaggcc

SEQ ID NO: 10267 - DNA, 20 bp, Unknown
  Description of Unknown: gRNA target site sequence
tgtgagagagaaggccggga

SEQ ID NO: 10268 - DNA, 20 bp, Unknown
  Description of Unknown: gRNA target site sequence
gtgagagagaaggccgggaa

SEQ ID NO: 10269 - DNA, 20 bp, Unknown
  Description of Unknown: gRNA target site sequence
gccgggaaaggaccataatg

SEQ ID NO: 10270 - DNA, 20 bp, Unknown
  Description of Unknown: gRNA target site sequence
atgaagcacaattatgttac

SEQ ID NO: 10271 - DNA, 20 bp, Unknown
  Description of Unknown: gRNA target site sequence
tgaagcacaattatgttact

SEQ ID NO: 10272 - DNA, 20 bp, Unknown
  Description of Unknown: gRNA target site sequence
ttactaggtcctccttgctt

SEQ ID NO: 10273 - DNA, 20 bp, Unknown
  Description of Unknown: gRNA target site sequence
tactaggtcctccttgcttt

SEQ ID NO: 10274 - DNA, 20 bp, Unknown
  Description of Unknown: gRNA target site sequence
actaggtcctccttgctttg

SEQ ID NO: 10275 - DNA, 20 bp, Unknown
  Description of Unknown: gRNA target site sequence
cctccttgctttggggtcac

SEQ ID NO: 10276 - DNA, 20 bp, Unknown
  Description of Unknown: gRNA target site sequence
accagcctattcctctttga

SEQ ID NO: 10277 - DNA, 20 bp, Unknown
  Description of Unknown: gRNA target site sequence
tgtcttttgtatccacccta

SEQ ID NO: 10278 - DNA, 20 bp, Unknown
  Description of Unknown: gRNA target site sequence
gtcttttgtatccaccctat

SEQ ID NO: 10279 - DNA, 20 bp, Unknown
  Description of Unknown: gRNA target site sequence
tttgtatccaccctatgggt

SEQ ID NO: 10280 - DNA, 20 bp, Unknown
  Description of Unknown: gRNA target site sequence
cccattgtctgtccatcccc

SEQ ID NO: 10281 - DNA, 20 bp, Unknown
  Description of Unknown: gRNA target site sequence
ttgtctgtccatcccccagt

SEQ ID NO: 10282 - DNA, 20 bp, Unknown
  Description of Unknown: gRNA target site sequence
tgtctgtccatcccccagtt

SEQ ID NO: 10283 - DNA, 20 bp, Unknown
  Description of Unknown: gRNA target site sequence
ttaggcactgcctaacattc

SEQ ID NO: 10284 - DNA, 20 bp, Unknown
  Description of Unknown: gRNA target site sequence
taggcactgcctaacattcc

SEQ ID NO: 10285 - DNA, 20 bp, Unknown
  Description of Unknown: gRNA target site sequence
ctacttctcaccattttatg

SEQ ID NO: 10286 - DNA, 20 bp, Unknown
  Description of Unknown: gRNA target site sequence
cttctcaccattttatgtgg

SEQ ID NO: 10287 - DNA, 20 bp, Unknown
  Description of Unknown: gRNA target site sequence
ttatgtggtagttttttaac

SEQ ID NO: 10288 - DNA, 20 bp, Unknown
  Description of Unknown: gRNA target site sequence
atgtggtagttttttaactg

SEQ ID NO: 10289 - DNA, 20 bp, Unknown
  Description of Unknown: gRNA target site sequence
ggtagttttttaactggagc

SEQ ID NO: 10290 - DNA, 20 bp, Unknown
  Description of Unknown: gRNA target site sequence
gtagttttttaactggagca

SEQ ID NO: 10291 - DNA, 20 bp, Unknown
  Description of Unknown: gRNA target site sequence
tagttttttaactggagcaa

SEQ ID NO: 10292 - DNA, 20 bp, Unknown
  Description of Unknown: gRNA target site sequence
ttttaactggagcaagggat

SEQ ID NO: 10293 - DNA, 20 bp, Unknown
  Description of Unknown: gRNA target site sequence
ggattggaacccaaaaaaac

SEQ ID NO: 10294 - DNA, 20 bp, Unknown
  Description of Unknown: gRNA target site sequence
aaaaaacaagatccaaatcc

SEQ ID NO: 10295 - DNA, 20 bp, Unknown
  Description of Unknown: gRNA target site sequence
aacttcctttgtccaccaac

SEQ ID NO: 10296 - DNA, 20 bp, Unknown
  Description of Unknown: gRNA target site sequence
tgtccaccaacaagactttt

SEQ ID NO: 10297 - DNA, 20 bp, Unknown
  Description of Unknown: gRNA target site sequence
caccaacaagacttttaaga

SEQ ID NO: 10298 - DNA, 20 bp, Unknown
  Description of Unknown: gRNA target site sequence
tatcacttttttctgcatgt

SEQ ID NO: 10299 - DNA, 20 bp, Unknown
  Description of Unknown: gRNA target site sequence
atcacttttttctgcatgtg

SEQ ID NO: 10300 - DNA, 20 bp, Unknown
  Description of Unknown: gRNA target site sequence
taatcaccattctgactttg

SEQ ID NO: 10301 - DNA, 20 bp, Unknown
  Description of Unknown: gRNA target site sequence
gactttgcagaaactgtgtg

SEQ ID NO: 10302 - DNA, 20 bp, Unknown
  Description of Unknown: gRNA target site sequence
actttgcagaaactgtgtga

SEQ ID NO: 10303 - DNA, 20 bp, Unknown
  Description of Unknown: gRNA target site sequence
aaattatgtacgaattcaaa

SEQ ID NO: 10304 - DNA, 20 bp, Unknown
  Description of Unknown: gRNA target site sequence
aattcaaaaagccccctccc

SEQ ID NO: 10305 - DNA, 20 bp, Unknown
  Description of Unknown: gRNA target site sequence
tcaaaaagccccctcccaag

SEQ ID NO: 10306 - DNA, 20 bp, Unknown
  Description of Unknown: gRNA target site sequence
caaaaagccccctcccaagc

SEQ ID NO: 10307 - DNA, 20 bp, Unknown
  Description of Unknown: gRNA target site sequence
aggttatttataccaaatct

SEQ ID NO: 10308 - DNA, 20 bp, Unknown
  Description of Unknown: gRNA target site sequence
ggttatttataccaaatcta

SEQ ID NO: 10309 - DNA, 20 bp, Unknown
  Description of Unknown: gRNA target site sequence
tataccaaatctaaggtgct

SEQ ID NO: 10310 - DNA, 20 bp, Unknown
  Description of Unknown: gRNA target site sequence
ataccaaatctaaggtgctc

SEQ ID NO: 10311 - DNA, 20 bp, Unknown
  Description of Unknown: gRNA target site sequence
atctaaggtgctcaggaatg

SEQ ID NO: 10312 - DNA, 20 bp, Unknown
  Description of Unknown: gRNA target site sequence
tctaaggtgctcaggaatga

SEQ ID NO: 10313 - DNA, 20 bp, Unknown
  Description of Unknown: gRNA target site sequence
ctaaggtgctcaggaatgaa

SEQ ID NO: 10314 - DNA, 20 bp, Unknown
  Description of Unknown: gRNA target site sequence
taaggtgctcaggaatgaag

SEQ ID NO: 10315 - DNA, 20 bp, Unknown
  Description of Unknown: gRNA target site sequence
ctcaggaatgaaggggaatc

SEQ ID NO: 10316 - DNA, 20 bp, Unknown
  Description of Unknown: gRNA target site sequence
tcaggaatgaaggggaatct

SEQ ID NO: 10317 - DNA, 20 bp, Unknown
  Description of Unknown: gRNA target site sequence
aatgaaggggaatctgggat

SEQ ID NO: 10318 - DNA, 20 bp, Unknown
  Description of Unknown: gRNA target site sequence
atgaaggggaatctgggatg

SEQ ID NO: 10319 - DNA, 20 bp, Unknown
  Description of Unknown: gRNA target site sequence
tgaaggggaatctgggatga

SEQ ID NO: 10320 - DNA, 20 bp, Unknown
  Description of Unknown: gRNA target site sequence
aaggggaatctgggatgagg

SEQ ID NO: 10321 - DNA, 20 bp, Unknown
  Description of Unknown: gRNA target site sequence
ctgggatgagggagacattt

SEQ ID NO: 10322 - DNA, 26 bp, Unknown
  Description of Unknown: gRNA target site sequence
tccagttctacgggctctcggagaat

SEQ ID NO: 10323 - DNA, 26 bp, Unknown
  Description of Unknown: gRNA target site sequence
gatctagtcttgtccgctacctggat

SEQ ID NO: 10324 - DNA, 26 bp, Unknown
  Description of Unknown: gRNA target site sequence
agatcgtcagcgccgaggcctggggt

SEQ ID NO: 10325 - DNA, 26 bp, Unknown
  Description of Unknown: gRNA target site sequence
caggcctcggcgctgacgatctgggt

SEQ ID NO: 10326 - DNA, 26 bp, Unknown
  Description of Unknown: gRNA target site sequence
gttcgagagcagagacggcgaaagat

SEQ ID NO: 10327 - DNA, 26 bp, Unknown
  Description of Unknown: gRNA target site sequence
cggagaatgacgagtggacccaggat

SEQ ID NO: 10328 - DNA, 26 bp, Unknown
  Description of Unknown: gRNA target site sequence
cggcgctgacgatctgggtgacaggt

SEQ ID NO: 10329 - DNA, 26 bp, Unknown
  Description of Unknown: gRNA target site sequence
ctacgggctctcggagaatgacgagt

SEQ ID NO: 10330 - DNA, 26 bp, Unknown
  Description of Unknown: gRNA target site sequence
agactgtggcttcacctccggtaagt

SEQ ID NO: 10331 - DNA, 26 bp, Unknown
  Description of Unknown: gRNA target site sequence
gaactggacttgacagcggaagtggt

SEQ ID NO: 10332 - DNA, 26 bp, Unknown
  Description of Unknown: gRNA target site sequence
ctcgggtgggaacacgtttttcaggt

SEQ ID NO: 10333 - DNA, 26 bp, Unknown
  Description of Unknown: gRNA target site sequence
gtgacaggtttggccctatcctgggt

SEQ ID NO: 10334 - DNA, 26 bp, Unknown
  Description of Unknown: gRNA target site sequence
atggctcaaacacagcgacctcgggt

SEQ ID NO: 10335 - DNA, 26 bp, Unknown
  Description of Unknown: gRNA target site sequence
tgtggcttcacctccggtaagtgagt

SEQ ID NO: 10336 - DNA, 26 bp, Unknown
  Description of Unknown: gRNA target site sequence
ccccgcaaccacttccgctgtcaagt

SEQ ID NO: 10337 - DNA, 26 bp, Unknown
  Description of Unknown: gRNA target site sequence
gcggctgctcaggcagtatctggagt

SEQ ID NO: 10338 - DNA, 26 bp, Unknown
  Description of Unknown: gRNA target site sequence
caaccacttccgctgtcaagtccagt

SEQ ID NO: 10339 - DNA, 26 bp, Unknown
  Description of Unknown: gRNA target site sequence
ccagctcagctccacgtggtcggggt

SEQ ID NO: 10340 - DNA, 26 bp, Unknown
  Description of Unknown: gRNA target site sequence
gggggctttttgaattcgtacataat

SEQ ID NO: 10341 - DNA, 26 bp, Unknown
  Description of Unknown: gRNA target site sequence
gcgccgaggcctggggtagagcaggt

SEQ ID NO: 10342 - DNA, 26 bp, Unknown
  Description of Unknown: gRNA target site sequence
tgctgctccagtgccagcgaagtggt

SEQ ID NO: 10343 - DNA, 26 bp, Unknown
  Description of Unknown: gRNA target site sequence
ccctcaaggagcagcccgccctcaat

SEQ ID NO: 10344 - DNA, 26 bp, Unknown
  Description of Unknown: gRNA target site sequence
tactgcctgagcagccgcctgagggt

SEQ ID NO: 10345 - DNA, 26 bp, Unknown
  Description of Unknown: gRNA target site sequence
ctaccccaggcctcggcgctgacgat

SEQ ID NO: 10346 - DNA, 26 bp, Unknown
  Description of Unknown: gRNA target site sequence
gatccaggtagcggacaagactagat

SEQ ID NO: 10347 - DNA, 26 bp, Unknown
  Description of Unknown: gRNA target site sequence
aggaggctgactttgtactatctgat

SEQ ID NO: 10348 - DNA, 26 bp, Unknown
  Description of Unknown: gRNA target site sequence
gcagcccgccctcaatgactccagat

SEQ ID NO: 10349 - DNA, 26 bp, Unknown
  Description of Unknown: gRNA target site sequence
agtgccagcgaagtggtcactatgat

SEQ ID NO: 10350 - DNA, 26 bp, Unknown
  Description of Unknown: gRNA target site sequence
gagaatgggatgcacaccactcagat

SEQ ID NO: 10351 - DNA, 26 bp, Unknown
  Description of Unknown: gRNA target site sequence
gctttgctgaccctgtgaaccttgat

SEQ ID NO: 10352 - DNA, 26 bp, Unknown
  Description of Unknown: gRNA target site sequence
gttaggcactgcctaacattccaggt

SEQ ID NO: 10353 - DNA, 26 bp, Unknown
  Description of Unknown: gRNA target site sequence
aagcaaggaggacctagtaacataat

SEQ ID NO: 10354 - DNA, 26 bp, Unknown
  Description of Unknown: gRNA target site sequence
ctgaaaaacgtgttcccacccgaggt

SEQ ID NO: 10355 - DNA, 26 bp, Unknown
  Description of Unknown: gRNA target site sequence
tgctctcgaaccagggcatggagaat

SEQ ID NO: 10356 - DNA, 26 bp, Unknown
  Description of Unknown: gRNA target site sequence
tcacttaccggaggtgaagccacagt

SEQ ID NO: 10357 - DNA, 26 bp, Unknown
  Description of Unknown: gRNA target site sequence
gggcagtgccaacccatagggtggat

SEQ ID NO: 10358 - DNA, 26 bp, Unknown
  Description of Unknown: gRNA target site sequence
ttgacagcggaagtggttgcgggggt

SEQ ID NO: 10359 - DNA, 26 bp, Unknown
  Description of Unknown: gRNA target site sequence
ctcagatgctgagctgtatggctggt

SEQ ID NO: 10360 - DNA, 26 bp, Unknown
  Description of Unknown: gRNA target site sequence
ggtgggatgatcaaggttcacagggt

SEQ ID NO: 10361 - DNA, 26 bp, Unknown
  Description of Unknown: gRNA target site sequence
agtggacaaggtgggatgatcaaggt

SEQ ID NO: 10362 - DNA, 26 bp, Unknown
  Description of Unknown: gRNA target site sequence
aggtgagaccagctaccagggaaaat

SEQ ID NO: 10363 - DNA, 26 bp, Unknown
  Description of Unknown: gRNA target site sequence
ttccctggtagctggtctcacctaat

SEQ ID NO: 10364 - DNA, 26 bp, Unknown
  Description of Unknown: gRNA target site sequence
tgttaggcagtgcctaactgggggat

SEQ ID NO: 10365 - DNA, 26 bp, Unknown
  Description of Unknown: gRNA target site sequence
aaagcttagctctaaggtgtcaggat

SEQ ID NO: 10366 - DNA, 26 bp, Unknown
  Description of Unknown: gRNA target site sequence
gaccctcaggcggctgctcaggcagt

SEQ ID NO: 10367 - DNA, 26 bp, Unknown
  Description of Unknown: gRNA target site sequence
tgtccgtggattctccatgccctggt

SEQ ID NO: 10368 - DNA, 26 bp, Unknown
  Description of Unknown: gRNA target site sequence
gtgtttgagccatcagaagcagagat

SEQ ID NO: 10369 - DNA, 26 bp, Unknown
  Description of Unknown: gRNA target site sequence
gacaccttagagctaagctttcaagt

SEQ ID NO: 10370 - DNA, 26 bp, Unknown
  Description of Unknown: gRNA target site sequence
aaaggagagactcacttaccggaggt

SEQ ID NO: 10371 - DNA, 26 bp, Unknown
  Description of Unknown: gRNA target site sequence
agtcagcctcctttgatagccctggt

SEQ ID NO: 10372 - DNA, 26 bp, Unknown
  Description of Unknown: gRNA target site sequence
ataccaaatctaaggtgctcaggaat

SEQ ID NO: 10373 - DNA, 26 bp, Unknown
  Description of Unknown: gRNA target site sequence
ccagccatacagctcagcatctgagt

SEQ ID NO: 10374 - DNA, 26 bp, Unknown
  Description of Unknown: gRNA target site sequence
ctcaggaatgaaggggaatctgggat

SEQ ID NO: 10375 - DNA, 26 bp, Unknown
  Description of Unknown: gRNA target site sequence
gggtcaccagcctattcctctttgat

SEQ ID NO: 10376 - DNA, 26 bp, Unknown
  Description of Unknown: gRNA target site sequence
tcattcctgagcaccttagatttggt

SEQ ID NO: 10377 - DNA, 26 bp, Unknown
  Description of Unknown: gRNA target site sequence
cctgcttgggagggggctttttgaat

SEQ ID NO: 10378 - DNA, 26 bp, Unknown
  Description of Unknown: gRNA target site sequence
cacatgcatatcagatagtacaaagt

SEQ ID NO: 10379 - DNA, 26 bp, Unknown
  Description of Unknown: gRNA target site sequence
agtgtggccttttgggtgtgggagat

SEQ ID NO: 10380 - DNA, 26 bp, Unknown
  Description of Unknown: gRNA target site sequence
tgtgagtctgtgatgtaaggctcaat

SEQ ID NO: 10381 - DNA, 26 bp, Unknown
  Description of Unknown: gRNA target site sequence
catggagaatccacggacacaggggt

SEQ ID NO: 10382 - DNA, 26 bp, Unknown
  Description of Unknown: gRNA target site sequence
tagggttgctctaagagctgtctggt

SEQ ID NO: 10383 - DNA, 26 bp, Unknown
  Description of Unknown: gRNA target site sequence
gatagggccaaacctgtcacccagat

SEQ ID NO: 10384 - DNA, 26 bp, Unknown
  Description of Unknown: gRNA target site sequence
aggcacaccagtgtggccttttgggt

SEQ ID NO: 10385 - DNA, 26 bp, Unknown
  Description of Unknown: gRNA target site sequence
gcctaactgggggatggacagacaat

SEQ ID NO: 10386 - DNA, 26 bp, Unknown
  Description of Unknown: gRNA target site sequence
gaaagccagagtggacaaggtgggat

SEQ ID NO: 10387 - DNA, 26 bp, Unknown
  Description of Unknown: gRNA target site sequence
caatgggcagtgccaacccatagggt

SEQ ID NO: 10388 - DNA, 26 bp, Unknown
  Description of Unknown: gRNA target site sequence
tcatgctgctccagtgccagcgaagt

SEQ ID NO: 10389 - DNA, 26 bp, Unknown
  Description of Unknown: gRNA target site sequence
gtgtttgtggcctgtgagtctgtgat

SEQ ID NO: 10390 - DNA, 26 bp, Unknown
  Description of Unknown: gRNA target site sequence
tgctctaagagctgtctggtcctggt

SEQ ID NO: 10391 - DNA, 26 bp, Unknown
  Description of Unknown: gRNA target site sequence
gggtcctggtttcctaagatcatagt

SEQ ID NO: 10392 - DNA, 26 bp, Unknown
  Description of Unknown: gRNA target site sequence
gggattggaacccaaaaaaacaagat

SEQ ID NO: 10393 - DNA, 26 bp, Unknown
  Description of Unknown: gRNA target site sequence
ctgagcaccttagatttggtataaat

SEQ ID NO: 10394 - DNA, 26 bp, Unknown
  Description of Unknown: gRNA target site sequence
gggtgtgggagatctctgcttctgat

SEQ ID NO: 10395 - DNA, 26 bp, Unknown
  Description of Unknown: gRNA target site sequence
tgactttgcagaaactgtgtgaaggt

SEQ ID NO: 10396 - DNA, 26 bp, Unknown
  Description of Unknown: gRNA target site sequence
cccaccaagaagcatagaggctgaat

SEQ ID NO: 10397 - DNA, 26 bp, Unknown
  Description of Unknown: gRNA target site sequence
tttcagactgtggcttcacctccggt

SEQ ID NO: 10398 - DNA, 26 bp, Unknown
  Description of Unknown: gRNA target site sequence
agagaaggccgggaaaggaccataat

SEQ ID NO: 10399 - DNA, 26 bp, Unknown
  Description of Unknown: gRNA target site sequence
aaggggtagaaccatcaaagaggaat

SEQ ID NO: 10400 - DNA, 26 bp, Unknown
  Description of Unknown: gRNA target site sequence
tggttgcgggggttctgccagaaggt

SEQ ID NO: 10401 - DNA, 26 bp, Unknown
  Description of Unknown: gRNA target site sequence
cctctatgcttcttggtgggggaagt

SEQ ID NO: 10402 - DNA, 26 bp, Unknown
  Description of Unknown: gRNA target site sequence
ccccgaccacgtggagctgagctggt

SEQ ID NO: 10403 - DNA, 26 bp, Unknown
  Description of Unknown: gRNA target site sequence
agacatcacctggaatgttaggcagt

SEQ ID NO: 10404 - DNA, 26 bp, Unknown
  Description of Unknown: gRNA target site sequence
tgcccattgtctgtccatcccccagt

SEQ ID NO: 10405 - DNA, 26 bp, Unknown
  Description of Unknown: gRNA target site sequence
tccattcagcctctatgcttcttggt

SEQ ID NO: 10406 - DNA, 26 bp, Unknown
  Description of Unknown: gRNA target site sequence
ggttcacagggtcagcaaagcacggt

SEQ ID NO: 10407 - DNA, 26 bp, Unknown
  Description of Unknown: gRNA target site sequence
ttcaaaaagccccctcccaagcaggt

SEQ ID NO: 10408 - DNA, 26 bp, Unknown
  Description of Unknown: gRNA target site sequence
gaccacgtggagctgagctggtgggt

SEQ ID NO: 10409 - DNA, 26 bp, Unknown
  Description of Unknown: gRNA target site sequence
cgtacataatttaaccttcacacagt

SEQ ID NO: 10410 - DNA, 26 bp, Unknown
  Description of Unknown: gRNA target site sequence
tttgggttccaatcccttgctccagt

SEQ ID NO: 10411 - DNA, 26 bp, Unknown
  Description of Unknown: gRNA target site sequence
ttggtggacaaaggaagttctaggat

SEQ ID NO: 10412 - DNA, 26 bp, Unknown
  Description of Unknown: gRNA target site sequence
ttctgtctccctcatgctgctccagt

SEQ ID NO: 10413 - DNA, 26 bp, Unknown
  Description of Unknown: gRNA target site sequence
ccccttcattcctgagcaccttagat

SEQ ID NO: 10414 - DNA, 26 bp, Unknown
  Description of Unknown: gRNA target site sequence
ttactaggtcctccttgctttggggt

SEQ ID NO: 10415 - DNA, 26 bp, Unknown
  Description of Unknown: gRNA target site sequence
tgggggatggacagacaatgggcagt

SEQ ID NO: 10416 - DNA, 26 bp, Unknown
  Description of Unknown: gRNA target site sequence
gacaaaggaagttctaggatttggat

SEQ ID NO: 10417 - DNA, 26 bp, Unknown
  Description of Unknown: gRNA target site sequence
aggcactgcctaacattccaggtgat

SEQ ID NO: 10418 - DNA, 26 bp, Unknown
  Description of Unknown: gRNA target site sequence
gccatacagctcagcatctgagtggt

SEQ ID NO: 10419 - DNA, 26 bp, Unknown
  Description of Unknown: gRNA target site sequence
tctaaaatgtctccctcatcccagat

SEQ ID NO: 10420 - DNA, 26 bp, Unknown
  Description of Unknown: gRNA target site sequence
aactaccacataaaatggtgagaagt

SEQ ID NO: 10421 - DNA, 26 bp, Unknown
  Description of Unknown: gRNA target site sequence
atctgaaggaagaatgagcttgaggt

SEQ ID NO: 10422 - DNA, 26 bp, Unknown
  Description of Unknown: gRNA target site sequence
atgtctcctcattgccattatttgat

SEQ ID NO: 10423 - DNA, 26 bp, Unknown
  Description of Unknown: gRNA target site sequence
gggaaaggaccataatgaagcacaat

SEQ ID NO: 10424 - DNA, 26 bp, Unknown
  Description of Unknown: gRNA target site sequence
gagacttgaaagcttagctctaaggt

SEQ ID NO: 10425 - DNA, 26 bp, Unknown
  Description of Unknown: gRNA target site sequence
ctgtcttttgtatccaccctatgggt

SEQ ID NO: 10426 - DNA, 26 bp, Unknown
  Description of Unknown: gRNA target site sequence
ttattacctcacatgcagaaaaaagt

SEQ ID NO: 10427 - DNA, 26 bp, Unknown
  Description of Unknown: gRNA target site sequence
aagggaagaggtaatggggctagggt

SEQ ID NO: 10428 - DNA, 26 bp, Unknown
  Description of Unknown: gRNA target site sequence
ccagttaaaaaactaccacataaaat

SEQ ID NO: 10429 - DNA, 26 bp, Unknown
  Description of Unknown: gRNA target site sequence
gaaccatcaaagaggaataggctggt

SEQ ID NO: 10430 - DNA, 26 bp, Unknown
  Description of Unknown: gRNA target site sequence
aaggtgtcaggatctgaaggaagaat

SEQ ID NO: 10431 - DNA, 26 bp, Unknown
  Description of Unknown: gRNA target site sequence
ttgcagaaactgtgtgaaggttaaat

SEQ ID NO: 10432 - DNA, 26 bp, Unknown
  Description of Unknown: gRNA target site sequence
cgaggcctggggtagagcaggtgagt

SEQ ID NO: 10433 - DNA, 26 bp, Unknown
  Description of Unknown: gRNA target site sequence
tcccacacccaaaaggccacactggt

SEQ ID NO: 10434 - DNA, 26 bp, Unknown
  Description of Unknown: gRNA target site sequence
atcccattctcttctggggtcctggt

SEQ ID NO: 10435 - DNA, 26 bp, Unknown
  Description of Unknown: gRNA target site sequence
caggttatttataccaaatctaaggt

SEQ ID NO: 10436 - DNA, 26 bp, Unknown
  Description of Unknown: gRNA target site sequence
aaatggtgagaagtaggtaggcaagt

SEQ ID NO: 10437 - DNA, 26 bp, Unknown
  Description of Unknown: gRNA target site sequence
aagtaggtaggcaagtttttattgat

SEQ ID NO: 10438 - DNA, 26 bp, Unknown
  Description of Unknown: gRNA target site sequence
accaacaagacttttaagacagaaat

SEQ ID NO: 10439 - DNA, 26 bp, Unknown
  Description of Unknown: gRNA target site sequence
tctttccattttccctggtagctggt

SEQ ID NO: 10440 - DNA, 26 bp, Unknown
  Description of Unknown: gRNA target site sequence
tgaccccaaagcaaggaggacctagt

SEQ ID NO: 10441 - DNA, 26 bp, Unknown
  Description of Unknown: gRNA target site sequence
tcccaagcaggttatttataccaaat

SEQ ID NO: 10442 - DNA, 26 bp, Unknown
  Description of Unknown: gRNA target site sequence
aggaaaccaggaccccagaagagaat

SEQ ID NO: 10443 - DNA, 26 bp, Unknown
  Description of Unknown: gRNA target site sequence
ctgaaagaaaacaggggaagaaaaat

SEQ ID NO: 10444 - DNA, 26 bp, Unknown
  Description of Unknown: gRNA target site sequence
gggctgctccttgaggggctgcgggt

SEQ ID NO: 10445 - DNA, 26 bp, Unknown
  Description of Unknown: gRNA target site sequence
gtgtgcatcccattctcttctggggt

SEQ ID NO: 10446 - DNA, 26 bp, Unknown
  Description of Unknown: gRNA target site sequence
gtaacataattgtgcttcattatggt

SEQ ID NO: 10447 - DNA, 26 bp, Unknown
  Description of Unknown: gRNA target site sequence
acgtggagctgagctggtgggtgaat

SEQ ID NO: 10448 - DNA, 26 bp, Unknown
  Description of Unknown: gRNA target site sequence
taaccttcacacagtttctgcaaagt

SEQ ID NO: 10449 - DNA, 26 bp, Unknown
  Description of Unknown: gRNA target site sequence
ggtcctctggaaagggaagaggtaat

SEQ ID NO: 10450 - DNA, 26 bp, Unknown
  Description of Unknown: gRNA target site sequence
tattgatagagaggaaatcaaataat

SEQ ID NO: 10451 - DNA, 26 bp, Unknown
  Description of Unknown: gRNA target site sequence
aatgggaaggaggtgcacagtggggt

SEQ ID NO: 10452 - DNA, 26 bp, Unknown
  Description of Unknown: gRNA target site sequence
tcaccagcctattcctctttgatggt

SEQ ID NO: 10453 - DNA, 26 bp, Unknown
  Description of Unknown: gRNA target site sequence
aatgaagcacaattatgttactaggt

SEQ ID NO: 10454 - DNA, 26 bp, Unknown
  Description of Unknown: gRNA target site sequence
tcacacagtttctgcaaagtcagaat

SEQ ID NO: 10455 - DNA, 26 bp, Unknown
  Description of Unknown: gRNA target site sequence
gactagatccagaagaaagccagagt

SEQ ID NO: 10456 - DNA, 26 bp, Unknown
  Description of Unknown: gRNA target site sequence
cacccaccagctcagctccacgtggt

SEQ ID NO: 10457 - DNA, 26 bp, Unknown
  Description of Unknown: gRNA target site sequence
agtttctgcaaagtcagaatggtgat

SEQ ID NO: 10458 - DNA, 26 bp, Unknown
  Description of Unknown: gRNA target site sequence
aggggaagaaaaatggatgagagaat

SEQ ID NO: 10459 - DNA, 26 bp, Unknown
  Description of Unknown: gRNA target site sequence
ggcaatgaggagacatcacctggaat

SEQ ID NO: 10460 - DNA, 26 bp, Unknown
  Description of Unknown: gRNA target site sequence
cttctggggtcctggtttcctaagat

SEQ ID NO: 10461 - DNA, 26 bp, Unknown
  Description of Unknown: gRNA target site sequence
ttgtccactctggctttcttctggat

SEQ ID NO: 10462 - DNA, 26 bp, Unknown
  Description of Unknown: gRNA target site sequence
acctcaagctcattcttccttcagat

SEQ ID NO: 10463 - DNA, 26 bp, Unknown
  Description of Unknown: gRNA target site sequence
tctgggatgagggagacattttagat

SEQ ID NO: 10464 - DNA, 26 bp, Unknown
  Description of Unknown: gRNA target site sequence
aagtcttgttggtggacaaaggaagt

SEQ ID NO: 10465 - DNA, 26 bp, Unknown
  Description of Unknown: gRNA target site sequence
tacttctcaccattttatgtggtagt

SEQ ID NO: 10466 - DNA, 26 bp, Unknown
  Description of Unknown: gRNA target site sequence
cttttttctgcatgtgaggtaataat

SEQ ID NO: 10467 - DNA, 26 bp, Unknown
  Description of Unknown: gRNA target site sequence
atacaaaagacaggcaaggaaggggt

SEQ ID NO: 10468 - DNA, 26 bp, Unknown
  Description of Unknown: gRNA target site sequence
tcaggtcctctggaaagggaagaggt

SEQ ID NO: 10469 - DNA, 26 bp, Unknown
  Description of Unknown: gRNA target site sequence
taaggtgctcaggaatgaaggggaat

SEQ ID NO: 10470 - DNA, 26 bp, Unknown
  Description of Unknown: gRNA target site sequence
tatgcatgtgtttgtggcctgtgagt

SEQ ID NO: 10471 - DNA, 26 bp, Unknown
  Description of Unknown: gRNA target site sequence
ccagctaccagggaaaatggaaagat

SEQ ID NO: 10472 - DNA, 26 bp, Unknown
  Description of Unknown: gRNA target site sequence
ggaacccaaaaaaacaagatccaaat

SEQ ID NO: 10473 - DNA, 26 bp, Unknown
  Description of Unknown: gRNA target site sequence
ccacaaacacatgcatatcagatagt

SEQ ID NO: 10474 - DNA, 26 bp, Unknown
  Description of Unknown: gRNA target site sequence
accaggaccccagaagagaatgggat

SEQ ID NO: 10475 - DNA, 26 bp, Unknown
  Description of Unknown: gRNA target site sequence
ggcctggggagatgcctggaggagat

SEQ ID NO: 10476 - DNA, 26 bp, Unknown
  Description of Unknown: gRNA target site sequence
cacagtttctgcaaagtcagaatggt

SEQ ID NO: 10477 - DNA, 26 bp, Unknown
  Description of Unknown: gRNA target site sequence
aggatttggatcttgtttttttgggt

SEQ ID NO: 10478 - DNA, 26 bp, Unknown
  Description of Unknown: gRNA target site sequence
tcacttttttctgcatgtgaggtaat

SEQ ID NO: 10479 - DNA, 26 bp, Unknown
  Description of Unknown: gRNA target site sequence
aggccacaaacacatgcatatcagat

SEQ ID NO: 10480 - DNA, 26 bp, Unknown
  Description of Unknown: gRNA target site sequence
gttaaaaaactaccacataaaatggt

SEQ ID NO: 10481 - DNA, 26 bp, Unknown
  Description of Unknown: gRNA target site sequence
gtgataggaatttctgtcttaaaagt

SEQ ID NO: 10482 - DNA, 26 bp, Unknown
  Description of Unknown: gRNA target site sequence
gtgtgaaggttaaattatgtacgaat

SEQ ID NO: 10483 - DNA, 26 bp, Unknown
  Description of Unknown: gRNA target site sequence
accacataaaatggtgagaagtaggt

SEQ ID NO: 10484 - DNA, 26 bp, Unknown
  Description of Unknown: gRNA target site sequence
agccagagtggacaaggtgggatgat

SEQ ID NO: 10485 - DNA, 26 bp, Unknown
  Description of Unknown: gRNA target site sequence
ggggagatgcctggaggagattaggt

SEQ ID NO: 10486 - DNA, 26 bp, Unknown
  Description of Unknown: gRNA target site sequence
gtagaactggacttgacagcggaagt

SEQ ID NO: 10487 - DNA, 26 bp, Unknown
  Description of Unknown: gRNA target site sequence
cactctggctttcttctggatctagt

SEQ ID NO: 10488 - DNA, 26 bp, Unknown
  Description of Unknown: gRNA target site sequence
cagaagaaagccagagtggacaaggt

SEQ ID NO: 10489 - DNA, 26 bp, Unknown
  Description of Unknown: gRNA target site sequence
acctacttctcaccattttatgtggt

SEQ ID NO: 10490 - DNA, 26 bp, Unknown
  Description of Unknown: gRNA target site sequence
cattatttgatttcctctctatcaat

SEQ ID NO: 10491 - DNA, 26 bp, Unknown
  Description of Unknown: gRNA target site sequence
ttttattgatagagaggaaatcaaat

SEQ ID NO: 10492 - DNA, 26 bp, Unknown
  Description of Unknown: gRNA target site sequence
agctggtgggtgaatgggaaggaggt

SEQ ID NO: 10493 - DNA, 26 bp, Unknown
  Description of Unknown: gRNA target site sequence
atagtacaaagtcagcctcctttgat

SEQ ID NO: 10494 - DNA, 26 bp, Unknown
  Description of Unknown: gRNA target site sequence
tagagaggaaatcaaataatggcaat

SEQ ID NO: 10495 - DNA, 26 bp, Unknown
  Description of Unknown: gRNA target site sequence
cacatgcagaaaaaagtgataggaat

SEQ ID NO: 10496 - DNA, 26 bp, Unknown
  Description of Unknown: gRNA target site sequence
tggatcttgtttttttgggttccaat

SEQ ID NO: 10497 - DNA, 26 bp, Unknown
  Description of Unknown: gRNA target site sequence
ctatcacttttttctgcatgtgaggt

SEQ ID NO: 10498 - DNA, 26 bp, Unknown
  Description of Unknown: gRNA target site sequence
acctggatctttccattttccctggt

SEQ ID NO: 10499 - DNA, 26 bp, Unknown
  Description of Unknown: gRNA target site sequence
accagggaaaatggaaagatccaggt

SEQ ID NO: 10500 - DNA, 26 bp, Unknown
  Description of Unknown: gRNA target site sequence
ttacctcacatgcagaaaaaagtgat

SEQ ID NO: 10501 - DNA, 26 bp, Unknown
  Description of Unknown: gRNA target site sequence
aagaaaacaggggaagaaaaatggat

SEQ ID NO: 10502 - DNA, 26 bp, Unknown
  Description of Unknown: gRNA target site sequence
atttctgtcttaaaagtcttgttggt

SEQ ID NO: 10503 - DNA, 26 bp, Unknown
  Description of Unknown: gRNA target site sequence
gggtgaatgggaaggaggtgcacagt

SEQ ID NO: 10504 - DNA, 26 bp, Unknown
  Description of Unknown: gRNA target site sequence
caagtttttattgatagagaggaaat

SEQ ID NO: 10505 - DNA, 26 bp, Unknown
  Description of Unknown: gRNA target site sequence
agaagcctgtggccaggcacaccagt

SEQ ID NO: 10506 - DNA, 26 bp, Unknown
  Description of Unknown: gRNA target site sequence
agcaggtgagtggggcctggggagat

SEQ ID NO: 10507 - DNA, 26 bp, Unknown
  Description of Unknown: gRNA target site sequence
gtagttttttaactggagcaagggat

SEQ ID NO: 10508 - DNA, 27 bp, Unknown
  Description of Unknown: gRNA target site sequence
agcggacaagactagatccagaagaaa

SEQ ID NO: 10509 - DNA, 27 bp, Unknown
  Description of Unknown: gRNA target site sequence
ttcacacagtttctgcaaagtcagaat

SEQ ID NO: 10510 - DNA, 27 bp, Unknown
  Description of Unknown: gRNA target site sequence
tggtgattattacctcacatgcagaaa

SEQ ID NO: 10511 - DNA, 27 bp, Unknown
  Description of Unknown: gRNA target site sequence
ctgctctcgaaccagggcatggagaat

SEQ ID NO: 10512 - DNA, 27 bp, Unknown
  Description of Unknown: gRNA target site sequence
taggaaaccaggaccccagaagagaat

SEQ ID NO: 10513 - DNA, 27 bp, Unknown
  Description of Unknown: gRNA target site sequence
gtccagttctacgggctctcggagaat

SEQ ID NO: 10514 - DNA, 27 bp, Unknown
  Description of Unknown: gRNA target site sequence
taaggtgtcaggatctgaaggaagaat

SEQ ID NO: 10515 - DNA, 27 bp, Unknown
  Description of Unknown: gRNA target site sequence
ataatcaccattctgactttgcagaaa

SEQ ID NO: 10516 - DNA, 27 bp, Unknown
  Description of Unknown: gRNA target site sequence
cagtctgaaagaaaacaggggaagaaa

SEQ ID NO: 10517 - DNA, 27 bp, Unknown
  Description of Unknown: gRNA target site sequence
ccaccaacaagacttttaagacagaaa

SEQ ID NO: 10518 - DNA, 27 bp, Unknown
  Description of Unknown: gRNA target site sequence
caggggaagaaaaatggatgagagaat

SEQ ID NO: 10519 - DNA, 27 bp, Unknown
  Description of Unknown: gRNA target site sequence
gcagagacggcgaaagatagagagaaa

SEQ ID NO: 10520 - DNA, 27 bp, Unknown
  Description of Unknown: gRNA target site sequence
ggaggtgaagccacagtctgaaagaaa

SEQ ID NO: 10521 - DNA, 28 bp, Unknown
  Description of Unknown: gRNA target site sequence
tccccttcattcctgagcaccttagatt

SEQ ID NO: 10522 - DNA, 28 bp, Unknown
  Description of Unknown: gRNA target site sequence
gttggtggacaaaggaagttctaggatt

SEQ ID NO: 10523 - DNA, 28 bp, Unknown
  Description of Unknown: gRNA target site sequence
ggtagttttttaactggagcaagggatt

SEQ ID NO: 10524 - DNA, 28 bp, Unknown
  Description of Unknown: gRNA target site sequence
gatgtctcctcattgccattatttgatt

SEQ ID NO: 10525 - DNA, 28 bp, Unknown
  Description of Unknown: gRNA target site sequence
atctaaaatgtctccctcatcccagatt

SEQ ID NO: 10526 - DNA, 28 bp, Unknown
  Description of Unknown: gRNA target site sequence
gggcctggggagatgcctggaggagatt

SEQ ID NO: 10527 - DNA, 28 bp, Unknown
  Description of Unknown: gRNA target site sequence
cagtttctgcaaagtcagaatggtgatt

SEQ ID NO: 10528 - DNA, 26 bp, Unknown
  Description of Unknown: gRNA target site sequence
ccaatcccttgctccagttaaaaaac

SEQ ID NO: 10529 - DNA, 26 bp, Unknown
  Description of Unknown: gRNA target site sequence
ttgatttcctctctatcaataaaaac

SEQ ID NO: 10530 - DNA, 26 bp, Unknown
  Description of Unknown: gRNA target site sequence
ttccctttccagaggacctgaaaaac

SEQ ID NO: 10531 - DNA, 26 bp, Unknown
  Description of Unknown: gRNA target site sequence
agcaagggattggaacccaaaaaaac

SEQ ID NO: 10532 - DNA, 26 bp, Unknown
  Description of Unknown: gRNA target site sequence
ggtgaagccacagtctgaaagaaaac

SEQ ID NO: 10533 - DNA, 27 bp, Unknown
  Description of Unknown: gRNA target site sequence
tttataccaaatctaaggtgctcagga

SEQ ID NO: 10534 - DNA, 27 bp, Unknown
  Description of Unknown: gRNA target site sequence
tttggtataaataacctgcttgggagg

SEQ ID NO: 10535 - DNA, 27 bp, Unknown
  Description of Unknown: gRNA target site sequence
tttgaattcgtacataatttaaccttc

SEQ ID NO: 10536 - DNA, 27 bp, Unknown
  Description of Unknown: gRNA target site sequence
tttgcagaaactgtgtgaaggttaaat

SEQ ID NO: 10537 - DNA, 27 bp, Unknown
  Description of Unknown: gRNA target site sequence
tttaaccttcacacagtttctgcaaag

SEQ ID NO: 10538 - DNA, 27 bp, Unknown
  Description of Unknown: gRNA target site sequence
tttctgcaaagtcagaatggtgattat

SEQ ID NO: 10539 - DNA, 27 bp, Unknown
  Description of Unknown: gRNA target site sequence
tttctgcatgtgaggtaataatcacca

SEQ ID NO: 10540 - DNA, 27 bp, Unknown
  Description of Unknown: gRNA target site sequence
tttaagacagaaattcctatcactttt

SEQ ID NO: 10541 - DNA, 27 bp, Unknown
  Description of Unknown: gRNA target site sequence
tttctgtcttaaaagtcttgttggtgg

SEQ ID NO: 10542 - DNA, 27 bp, Unknown
  Description of Unknown: gRNA target site sequence
tttgtccaccaacaagacttttaagac

SEQ ID NO: 10543 - DNA, 27 bp, Unknown
  Description of Unknown: gRNA target site sequence
tttggatcttgtttttttgggttccaa

SEQ ID NO: 10544 - DNA, 27 bp, Unknown
  Description of Unknown: gRNA target site sequence
tttgggttccaatcccttgctccagtt

SEQ ID NO: 10545 - DNA, 27 bp, Unknown
  Description of Unknown: gRNA target site sequence
tttaactggagcaagggattggaaccc

SEQ ID NO: 10546 - DNA, 27 bp, Unknown
  Description of Unknown: gRNA target site sequence
tttatgtggtagttttttaactggagc

SEQ ID NO: 10547 - DNA, 27 bp, Unknown
  Description of Unknown: gRNA target site sequence
tttcctctctatcaataaaaacttgcc

SEQ ID NO: 10548 - DNA, 27 bp, Unknown
  Description of Unknown: gRNA target site sequence
tttgatttcctctctatcaataaaaac

SEQ ID NO: 10549 - DNA, 27 bp, Unknown
  Description of Unknown: gRNA target site sequence
tttattgatagagaggaaatcaaataa

SEQ ID NO: 10550 - DNA, 27 bp, Unknown
  Description of Unknown: gRNA target site sequence
tttgtatccaccctatgggttggcact

SEQ ID NO: 10551 - DNA, 27 bp, Unknown
  Description of Unknown: gRNA target site sequence
tttgatggttctaccccttccttgcct

SEQ ID NO: 10552 - DNA, 27 bp, Unknown
  Description of Unknown: gRNA target site sequence
tttggggtcaccagcctattcctcttt

SEQ ID NO: 10553 - DNA, 27 bp, Unknown
  Description of Unknown: gRNA target site sequence
tttcccggccttctctctcacacatac

SEQ ID NO: 10554 - DNA, 27 bp, Unknown
  Description of Unknown: gRNA target site sequence
tttcaggtcctctggaaagggaagagg

SEQ ID NO: 10555 - DNA, 27 bp, Unknown
  Description of Unknown: gRNA target site sequence
tttccagaggacctgaaaaacgtgttc

SEQ ID NO: 10556 - DNA, 27 bp, Unknown
  Description of Unknown: gRNA target site sequence
tttgagccatcagaagcagagatctcc

SEQ ID NO: 10557 - DNA, 27 bp, Unknown
  Description of Unknown: gRNA target site sequence
tttgggtgtgggagatctctgcttctg

SEQ ID NO: 10558 - DNA, 27 bp, Unknown
  Description of Unknown: gRNA target site sequence
tttggccctatcctgggtccactcgtc

SEQ ID NO: 10559 - DNA, 27 bp, Unknown
  Description of Unknown: gRNA target site sequence
tttccctggtagctggtctcacctaat

SEQ ID NO: 10560 - DNA, 27 bp, Unknown
  Description of Unknown: gRNA target site sequence
tttccattttccctggtagctggtctc

SEQ ID NO: 10561 - DNA, 27 bp, Unknown
  Description of Unknown: gRNA target site sequence
tttcttctggatctagtcttgtccgct

SEQ ID NO: 10562 - DNA, 27 bp, Unknown
  Description of Unknown: gRNA target site sequence
tttgctgaccctgtgaaccttgatcat

SEQ ID NO: 10563 - DNA, 27 bp, Unknown
  Description of Unknown: gRNA target site sequence
tttcaagtctccctgaggaccagccat

SEQ ID NO: 10564 - DNA, 27 bp, Unknown
  Description of Unknown: gRNA target site sequence
tttcctaagatcatagtgaccacttcg

SEQ ID NO: 10565 - DNA, 27 bp, Unknown
  Description of Unknown: gRNA target site sequence
tttgatagccctggttctgtctccctc

SEQ ID NO: 10566 - DNA, 27 bp, Unknown
  Description of Unknown: gRNA target site sequence
tttgtactatctgatatgcatgtgttt

SEQ ID NO: 10567 - DNA, 27 bp, Unknown
  Description of Unknown: gRNA target site sequence
tttgtggcctgtgagtctgtgatgtaa

SEQ ID NO: 10568 - DNA, 27 bp, Unknown
  Description of Unknown: gRNA target site sequence
tttgtaaggacattgagccttacatca

SEQ ID NO: 10569 - DNA, 27 bp, Unknown
  Description of Unknown: gRNA target site sequence
tttcttcccctgttttctttcagactg

SEQ ID NO: 10570 - DNA, 27 bp, Unknown
  Description of Unknown: gRNA target site sequence
tttctttcagactgtggcttcacctcc

SEQ ID NO: 10571 - DNA, 27 bp, Unknown
  Description of Unknown: gRNA target site sequence
tttcagactgtggcttcacctccggta

SEQ ID NO: 10572 - DNA, 27 bp, Unknown
  Description of Unknown: gRNA target site sequence
tttctctctatctttcgccgtctctgc

SEQ ID NO: 10573 - DNA, 27 bp, Unknown
  Description of Unknown: gRNA target site sequence
tttcgccgtctctgctctcgaaccagg

SEQ ID NO: 10574 - DNA, 20 bp, Unknown
  Description of Unknown: gRNA target site sequence
cctgcgggccttgtcctgat

SEQ ID NO: 10575 - DNA, 20 bp, Unknown
  Description of Unknown: gRNA target site sequence
cgggccttgtcctgattggc

SEQ ID NO: 10576 - DNA, 20 bp, Unknown
  Description of Unknown: gRNA target site sequence
gggccttgtcctgattggct

SEQ ID NO: 10577 - DNA, 20 bp, Unknown
  Description of Unknown: gRNA target site sequence
gctgggcacgcgtttaatat

SEQ ID NO: 10578 - DNA, 20 bp, Unknown
  Description of Unknown: gRNA target site sequence
gggcacgcgtttaatataag

SEQ ID NO: 10579 - DNA, 20 bp, Unknown
  Description of Unknown: gRNA target site sequence
gcacgcgtttaatataagtg

SEQ ID NO: 10580 - DNA, 20 bp, Unknown
  Description of Unknown: gRNA target site sequence
cacgcgtttaatataagtgg

SEQ ID NO: 10581 - DNA, 20 bp, Unknown
  Description of Unknown: gRNA target site sequence
tataagtggaggcgtcgcgc

SEQ ID NO: 10582 - DNA, 20 bp, Unknown
  Description of Unknown: gRNA target site sequence
aagtggaggcgtcgcgctgg

SEQ ID NO: 10583 - DNA, 20 bp, Unknown
  Description of Unknown: gRNA target site sequence
agtggaggcgtcgcgctggc

SEQ ID NO: 10584 - DNA, 20 bp, Unknown
  Description of Unknown: gRNA target site sequence
cgcgctggcgggcattcctg

SEQ ID NO: 10585 - DNA, 20 bp, Unknown
  Description of Unknown: gRNA target site sequence
gcgggcattcctgaagctga

SEQ ID NO: 10586 - DNA, 20 bp, Unknown
  Description of Unknown: gRNA target site sequence
ttcctgaagctgacagcatt

SEQ ID NO: 10587 - DNA, 20 bp, Unknown
  Description of Unknown: gRNA target site sequence
tcctgaagctgacagcattc

SEQ ID NO: 10588 - DNA, 20 bp, Unknown
  Description of Unknown: gRNA target site sequence
aagctgacagcattcgggcc

SEQ ID NO: 10589 - DNA, 20 bp, Unknown
  Description of Unknown: gRNA target site sequence
ggccgagatgtctcgctccg

SEQ ID NO: 10590 - DNA, 20 bp, Unknown
  Description of Unknown: gRNA target site sequence
gatgtctcgctccgtggcct

SEQ ID NO: 10591 - DNA, 20 bp, Unknown
  Description of Unknown: gRNA target site sequence
ctcgcgctactctctctttc

SEQ ID NO: 10592 - DNA, 20 bp, Unknown
  Description of Unknown: gRNA target site sequence
gctactctctctttctggcc

SEQ ID NO: 10593 - DNA, 20 bp, Unknown
  Description of Unknown: gRNA target site sequence
tactctctctttctggcctg

SEQ ID NO: 10594 - DNA, 20 bp, Unknown
  Description of Unknown: gRNA target site sequence
actctctctttctggcctgg

SEQ ID NO: 10595 - DNA, 20 bp, Unknown
  Description of Unknown: gRNA target site sequence
tttctggcctggaggctatc

SEQ ID NO: 10596 - DNA, 20 bp, Unknown
  Description of Unknown: gRNA target site sequence
gcctggaggctatccagcgt

SEQ ID NO: 10597 - DNA, 20 bp, Unknown
  Description of Unknown: gRNA target site sequence
tctctcctaccctcccgctc

SEQ ID NO: 10598 - DNA, 20 bp, Unknown
  Description of Unknown: gRNA target site sequence
ctcccgctctgcaccctctg

SEQ ID NO: 10599 - DNA, 20 bp, Unknown
  Description of Unknown: gRNA target site sequence
ctccgtgacttcccttctcc

SEQ ID NO: 10600 - DNA, 20 bp, Unknown
  Description of Unknown: gRNA target site sequence
tcccttctccaagttctcct

SEQ ID NO: 10601 - DNA, 20 bp, Unknown
  Description of Unknown: gRNA target site sequence
cttctccaagttctccttgg

SEQ ID NO: 10602 - DNA, 20 bp, Unknown
  Description of Unknown: gRNA target site sequence
ttctccttggtggcccgccg

SEQ ID NO: 10603 - DNA, 20 bp, Unknown
  Description of Unknown: gRNA target site sequence
tctccttggtggcccgccgt

SEQ ID NO: 10604 - DNA, 20 bp, Unknown
  Description of Unknown: gRNA target site sequence
ctccttggtggcccgccgtg

SEQ ID NO: 10605 - DNA, 20 bp, Unknown
  Description of Unknown: gRNA target site sequence
ttggtggcccgccgtggggc

SEQ ID NO: 10606 - DNA, 20 bp, Unknown
  Description of Unknown: gRNA target site sequence
ggcccgccgtggggctagtc

SEQ ID NO: 10607 - DNA, 20 bp, Unknown
  Description of Unknown: gRNA target site sequence
gcccgccgtggggctagtcc

SEQ ID NO: 10608 - DNA, 20 bp, Unknown
  Description of Unknown: gRNA target site sequence
cccgccgtggggctagtcca

SEQ ID NO: 10609 - DNA, 20 bp, Unknown
  Description of Unknown: gRNA target site sequence
ccgtggggctagtccagggc

SEQ ID NO: 10610 - DNA, 20 bp, Unknown
  Description of Unknown: gRNA target site sequence
gctagtccagggctggatct

SEQ ID NO: 10611 - DNA, 20 bp, Unknown
  Description of Unknown: gRNA target site sequence
ctagtccagggctggatctc

SEQ ID NO: 10612 - DNA, 20 bp, Unknown
  Description of Unknown: gRNA target site sequence
tagtccagggctggatctcg

SEQ ID NO: 10613 - DNA, 20 bp, Unknown
  Description of Unknown: gRNA target site sequence
tccagggctggatctcgggg

SEQ ID NO: 10614 - DNA, 20 bp, Unknown
  Description of Unknown: gRNA target site sequence
agggctggatctcggggaag

SEQ ID NO: 10615 - DNA, 20 bp, Unknown
  Description of Unknown: gRNA target site sequence
gctggatctcggggaagcgg

SEQ ID NO: 10616 - DNA, 20 bp, Unknown
  Description of Unknown: gRNA target site sequence
ctggatctcggggaagcggc

SEQ ID NO: 10617 - DNA, 20 bp, Unknown
  Description of Unknown: gRNA target site sequence
tggatctcggggaagcggcg

SEQ ID NO: 10618 - DNA, 20 bp, Unknown
  Description of Unknown: gRNA target site sequence
atctcggggaagcggcgggg

SEQ ID NO: 10619 - DNA, 20 bp, Unknown
  Description of Unknown: gRNA target site sequence
ggggaagcggcggggtggcc

SEQ ID NO: 10620 - DNA, 20 bp, Unknown
  Description of Unknown: gRNA target site sequence
gggaagcggcggggtggcct

SEQ ID NO: 10621 - DNA, 20 bp, Unknown
  Description of Unknown: gRNA target site sequence
gaagcggcggggtggcctgg

SEQ ID NO: 10622 - DNA, 20 bp, Unknown
  Description of Unknown: gRNA target site sequence
gcggcggggtggcctgggag

SEQ ID NO: 10623 - DNA, 20 bp, Unknown
  Description of Unknown: gRNA target site sequence
cggcggggtggcctgggagt

SEQ ID NO: 10624 - DNA, 20 bp, Unknown
  Description of Unknown: gRNA target site sequence
ggcggggtggcctgggagtg

SEQ ID NO: 10625 - DNA, 20 bp, Unknown
  Description of Unknown: gRNA target site sequence
ggggtggcctgggagtgggg

SEQ ID NO: 10626 - DNA, 20 bp, Unknown
  Description of Unknown: gRNA target site sequence
gggtggcctgggagtgggga

SEQ ID NO: 10627 - DNA, 20 bp, Unknown
  Description of Unknown: gRNA target site sequence
ggtggcctgggagtggggaa

SEQ ID NO: 10628 - DNA, 20 bp, Unknown
  Description of Unknown: gRNA target site sequence
gtggcctgggagtggggaag

SEQ ID NO: 10629 - DNA, 20 bp, Unknown
  Description of Unknown: gRNA target site sequence
tggcctgggagtggggaagg

SEQ ID NO: 10630 - DNA, 20 bp, Unknown
  Description of Unknown: gRNA target site sequence
tggggaagggggtgcgcacc

SEQ ID NO: 10631 - DNA, 20 bp, Unknown
  Description of Unknown: gRNA target site sequence
ggggaagggggtgcgcaccc

SEQ ID NO: 10632 - DNA, 20 bp, Unknown
  Description of Unknown: gRNA target site sequence
cgcgcgctacttgccccttt

SEQ ID NO: 10633 - DNA, 20 bp, Unknown
  Description of Unknown: gRNA target site sequence
gcgctacttgcccctttcgg

SEQ ID NO: 10634 - DNA, 20 bp, Unknown
  Description of Unknown: gRNA target site sequence
cgctacttgcccctttcggc

SEQ ID NO: 10635 - DNA, 20 bp, Unknown
  Description of Unknown: gRNA target site sequence
gctacttgcccctttcggcg

SEQ ID NO: 10636 - DNA, 20 bp, Unknown
  Description of Unknown: gRNA target site sequence
tacttgcccctttcggcggg

SEQ ID NO: 10637 - DNA, 20 bp, Unknown
  Description of Unknown: gRNA target site sequence
ttgcccctttcggcggggag

SEQ ID NO: 10638 - DNA, 20 bp, Unknown
  Description of Unknown: gRNA target site sequence
tgcccctttcggcggggagc

SEQ ID NO: 10639 - DNA, 20 bp, Unknown
  Description of Unknown: gRNA target site sequence
gcccctttcggcggggagca

SEQ ID NO: 10640 - DNA, 20 bp, Unknown
  Description of Unknown: gRNA target site sequence
cccctttcggcggggagcag

SEQ ID NO: 10641 - DNA, 20 bp, Unknown
  Description of Unknown: gRNA target site sequence
cctttcggcggggagcaggg

SEQ ID NO: 10642 - DNA, 20 bp, Unknown
  Description of Unknown: gRNA target site sequence
cggggagcaggggagacctt

SEQ ID NO: 10643 - DNA, 20 bp, Unknown
  Description of Unknown: gRNA target site sequence
caggggagacctttggccta

SEQ ID NO: 10644 - DNA, 20 bp, Unknown
  Description of Unknown: gRNA target site sequence
agacctttggcctacggcga

SEQ ID NO: 10645 - DNA, 20 bp, Unknown
  Description of Unknown: gRNA target site sequence
gacctttggcctacggcgac

SEQ ID NO: 10646 - DNA, 20 bp, Unknown
  Description of Unknown: gRNA target site sequence
cctttggcctacggcgacgg

SEQ ID NO: 10647 - DNA, 20 bp, Unknown
  Description of Unknown: gRNA target site sequence
ctttggcctacggcgacggg

SEQ ID NO: 10648 - DNA, 20 bp, Unknown
  Description of Unknown: gRNA target site sequence
tttggcctacggcgacggga

SEQ ID NO: 10649 - DNA, 20 bp, Unknown
  Description of Unknown: gRNA target site sequence
gcctacggcgacgggagggt

SEQ ID NO: 10650 - DNA, 20 bp, Unknown
  Description of Unknown: gRNA target site sequence
cctacggcgacgggagggtc

SEQ ID NO: 10651 - DNA, 20 bp, Unknown
  Description of Unknown: gRNA target site sequence
gcgacgggagggtcgggaca

SEQ ID NO: 10652 - DNA, 20 bp, Unknown
  Description of Unknown: gRNA target site sequence
gggagggtcgggacaaagtt

SEQ ID NO: 10653 - DNA, 20 bp, Unknown
  Description of Unknown: gRNA target site sequence
ggagggtcgggacaaagttt

SEQ ID NO: 10654 - DNA, 20 bp, Unknown
  Description of Unknown: gRNA target site sequence
gagggtcgggacaaagttta

SEQ ID NO: 10655 - DNA, 20 bp, Unknown
  Description of Unknown: gRNA target site sequence
acaaagtttagggcgtcgat

SEQ ID NO: 10656 - DNA, 20 bp, Unknown
  Description of Unknown: gRNA target site sequence
tttagggcgtcgataagcgt

SEQ ID NO: 10657 - DNA, 20 bp, Unknown
  Description of Unknown: gRNA target site sequence
tagggcgtcgataagcgtca

SEQ ID NO: 10658 - DNA, 20 bp, Unknown
  Description of Unknown: gRNA target site sequence
tcgataagcgtcagagcgcc

SEQ ID NO: 10659 - DNA, 20 bp, Unknown
  Description of Unknown: gRNA target site sequence
cgataagcgtcagagcgccg

SEQ ID NO: 10660 - DNA, 20 bp, Unknown
  Description of Unknown: gRNA target site sequence
aagcgtcagagcgccgaggt

SEQ ID NO: 10661 - DNA, 20 bp, Unknown
  Description of Unknown: gRNA target site sequence
agcgtcagagcgccgaggtt

SEQ ID NO: 10662 - DNA, 20 bp, Unknown
  Description of Unknown: gRNA target site sequence
gcgtcagagcgccgaggttg

SEQ ID NO: 10663 - DNA, 20 bp, Unknown
  Description of Unknown: gRNA target site sequence
cgtcagagcgccgaggttgg

SEQ ID NO: 10664 - DNA, 20 bp, Unknown
  Description of Unknown: gRNA target site sequence
tcagagcgccgaggttgggg

SEQ ID NO: 10665 - DNA, 20 bp, Unknown
  Description of Unknown: gRNA target site sequence
cagagcgccgaggttggggg

SEQ ID NO: 10666 - DNA, 20 bp, Unknown
  Description of Unknown: gRNA target site sequence
agagcgccgaggttggggga

SEQ ID NO: 10667 - DNA, 20 bp, Unknown
  Description of Unknown: gRNA target site sequence
gtttctcttccgctctttcg

SEQ ID NO: 10668 - DNA, 20 bp, Unknown
  Description of Unknown: gRNA target site sequence
tttctcttccgctctttcgc

SEQ ID NO: 10669 - DNA, 20 bp, Unknown
  Description of Unknown: gRNA target site sequence
ttctcttccgctctttcgcg

SEQ ID NO: 10670 - DNA, 20 bp, Unknown
  Description of Unknown: gRNA target site sequence
ccgctctttcgcggggcctc

SEQ ID NO: 10671 - DNA, 20 bp, Unknown
  Description of Unknown: gRNA target site sequence
cgcggggcctctggctcccc

SEQ ID NO: 10672 - DNA, 20 bp, Unknown
  Description of Unknown: gRNA target site sequence
ggcctctggctcccccagcg

SEQ ID NO: 10673 - DNA, 20 bp, Unknown
  Description of Unknown: gRNA target site sequence
tctggctcccccagcgcagc

SEQ ID NO: 10674 - DNA, 20 bp, Unknown
  Description of Unknown: gRNA target site sequence
tggctcccccagcgcagctg

SEQ ID NO: 10675 - DNA, 20 bp, Unknown
  Description of Unknown: gRNA target site sequence
ctcccccagcgcagctggag

SEQ ID NO: 10676 - DNA, 20 bp, Unknown
  Description of Unknown: gRNA target site sequence
tcccccagcgcagctggagt

SEQ ID NO: 10677 - DNA, 20 bp, Unknown
  Description of Unknown: gRNA target site sequence
cccccagcgcagctggagtg

SEQ ID NO: 10678 - DNA, 20 bp, Unknown
  Description of Unknown: gRNA target site sequence
ccccagcgcagctggagtgg

SEQ ID NO: 10679 - DNA, 20 bp, Unknown
  Description of Unknown: gRNA target site sequence
agcgcagctggagtggggga

SEQ ID NO: 10680 - DNA, 20 bp, Unknown
  Description of Unknown: gRNA target site sequence
gcgcagctggagtgggggac

SEQ ID NO: 10681 - DNA, 20 bp, Unknown
  Description of Unknown: gRNA target site sequence
cagctggagtgggggacggg

SEQ ID NO: 10682 - DNA, 20 bp, Unknown
  Description of Unknown: gRNA target site sequence
agctggagtgggggacgggt

SEQ ID NO: 10683 - DNA, 20 bp, Unknown
  Description of Unknown: gRNA target site sequence
ggacgggtaggctcgtccca

SEQ ID NO: 10684 - DNA, 20 bp, Unknown
  Description of Unknown: gRNA target site sequence
gacgggtaggctcgtcccaa

SEQ ID NO: 10685 - DNA, 20 bp, Unknown
  Description of Unknown: gRNA target site sequence
gtaggctcgtcccaaaggcg

SEQ ID NO: 10686 - DNA, 20 bp, Unknown
  Description of Unknown: gRNA target site sequence
cgtcccaaaggcgcggcgct

SEQ ID NO: 10687 - DNA, 20 bp, Unknown
  Description of Unknown: gRNA target site sequence
gtcccaaaggcgcggcgctg

SEQ ID NO: 10688 - DNA, 20 bp, Unknown
  Description of Unknown: gRNA target site sequence
cgctgaggtttgtgaacgcg

SEQ ID NO: 10689 - DNA, 20 bp, Unknown
  Description of Unknown: gRNA target site sequence
ctgaggtttgtgaacgcgtg

SEQ ID NO: 10690 - DNA, 20 bp, Unknown
  Description of Unknown: gRNA target site sequence
tgaggtttgtgaacgcgtgg

SEQ ID NO: 10691 - DNA, 20 bp, Unknown
  Description of Unknown: gRNA target site sequence
gaggtttgtgaacgcgtgga

SEQ ID NO: 10692 - DNA, 20 bp, Unknown
  Description of Unknown: gRNA target site sequence
aggtttgtgaacgcgtggag

SEQ ID NO: 10693 - DNA, 20 bp, Unknown
  Description of Unknown: gRNA target site sequence
tgaacgcgtggaggggcgct

SEQ ID NO: 10694 - DNA, 20 bp, Unknown
  Description of Unknown: gRNA target site sequence
gaacgcgtggaggggcgctt

SEQ ID NO: 10695 - DNA, 20 bp, Unknown
  Description of Unknown: gRNA target site sequence
aacgcgtggaggggcgcttg

SEQ ID NO: 10696 - DNA, 20 bp, Unknown
  Description of Unknown: gRNA target site sequence
gtggaggggcgcttggggtc

SEQ ID NO: 10697 - DNA, 20 bp, Unknown
  Description of Unknown: gRNA target site sequence
tggaggggcgcttggggtct

SEQ ID NO: 10698 - DNA, 20 bp, Unknown
  Description of Unknown: gRNA target site sequence
ggaggggcgcttggggtctg

SEQ ID NO: 10699 - DNA, 20 bp, Unknown
  Description of Unknown: gRNA target site sequence
gaggggcgcttggggtctgg

SEQ ID NO: 10700 - DNA, 20 bp, Unknown
  Description of Unknown: gRNA target site sequence
ggggcgcttggggtctgggg

SEQ ID NO: 10701 - DNA, 20 bp, Unknown
  Description of Unknown: gRNA target site sequence
gggcgcttggggtctggggg

SEQ ID NO: 10702 - DNA, 20 bp, Unknown
  Description of Unknown: gRNA target site sequence
ggtctgggggaggcgtcgcc

SEQ ID NO: 10703 - DNA, 20 bp, Unknown
  Description of Unknown: gRNA target site sequence
gtctgggggaggcgtcgccc

SEQ ID NO: 10704 - DNA, 20 bp, Unknown
  Description of Unknown: gRNA target site sequence
gggggaggcgtcgcccgggt

SEQ ID NO: 10705 - DNA, 20 bp, Unknown
  Description of Unknown: gRNA target site sequence
ccgggtaagcctgtctgctg

SEQ ID NO: 10706 - DNA, 20 bp, Unknown
  Description of Unknown: gRNA target site sequence
tgctgcggctctgcttccct

SEQ ID NO: 10707 - DNA, 20 bp, Unknown
  Description of Unknown: gRNA target site sequence
cggctctgcttcccttagac

SEQ ID NO: 10708 - DNA, 20 bp, Unknown
  Description of Unknown: gRNA target site sequence
gctctgcttcccttagactg

SEQ ID NO: 10709 - DNA, 20 bp, Unknown
  Description of Unknown: gRNA target site sequence
tctgcttcccttagactgga

SEQ ID NO: 10710 - DNA, 20 bp, Unknown
  Description of Unknown: gRNA target site sequence
tcccttagactggagagctg

SEQ ID NO: 10711 - DNA, 20 bp, Unknown
  Description of Unknown: gRNA target site sequence
ggagagctgtggacttcgtc

SEQ ID NO: 10712 - DNA, 20 bp, Unknown
  Description of Unknown: gRNA target site sequence
gagagctgtggacttcgtct

SEQ ID NO: 10713 - DNA, 20 bp, Unknown
  Description of Unknown: gRNA target site sequence
acttcgtctaggcgcccgct

SEQ ID NO: 10714 - DNA, 20 bp, Unknown
  Description of Unknown: gRNA target site sequence
cccgctaagttcgcatgtcc

SEQ ID NO: 10715 - DNA, 20 bp, Unknown
  Description of Unknown: gRNA target site sequence
ttcgcatgtcctagcacctc

SEQ ID NO: 10716 - DNA, 20 bp, Unknown
  Description of Unknown: gRNA target site sequence
tcgcatgtcctagcacctct

SEQ ID NO: 10717 - DNA, 20 bp, Unknown
  Description of Unknown: gRNA target site sequence
ctagcacctctgggtctatg

SEQ ID NO: 10718 - DNA, 20 bp, Unknown
  Description of Unknown: gRNA target site sequence
tagcacctctgggtctatgt

SEQ ID NO: 10719 - DNA, 20 bp, Unknown
  Description of Unknown: gRNA target site sequence
agcacctctgggtctatgtg

SEQ ID NO: 10720 - DNA, 20 bp, Unknown
  Description of Unknown: gRNA target site sequence
gtctatgtggggccacaccg

SEQ ID NO: 10721 - DNA, 20 bp, Unknown
  Description of Unknown: gRNA target site sequence
tctatgtggggccacaccgt

SEQ ID NO: 10722 - DNA, 20 bp, Unknown
  Description of Unknown: gRNA target site sequence
ctatgtggggccacaccgtg

SEQ ID NO: 10723 - DNA, 20 bp, Unknown
  Description of Unknown: gRNA target site sequence
atgtggggccacaccgtggg

SEQ ID NO: 10724 - DNA, 20 bp, Unknown
  Description of Unknown: gRNA target site sequence
tgtggggccacaccgtgggg

SEQ ID NO: 10725 - DNA, 20 bp, Unknown
  Description of Unknown: gRNA target site sequence
gccacaccgtggggaggaaa

SEQ ID NO: 10726 - DNA, 20 bp, Unknown
  Description of Unknown: gRNA target site sequence
gaaacagcacgcgacgtttg

SEQ ID NO: 10727 - DNA, 20 bp, Unknown
  Description of Unknown: gRNA target site sequence
cgcgacgtttgtagaatgct

SEQ ID NO: 10728 - DNA, 20 bp, Unknown
  Description of Unknown: gRNA target site sequence
gaatgcttggctgtgataca

SEQ ID NO: 10729 - DNA, 20 bp, Unknown
  Description of Unknown: gRNA target site sequence
tgcttggctgtgatacaaag

SEQ ID NO: 10730 - DNA, 20 bp, Unknown
  Description of Unknown: gRNA target site sequence
tgtcacttttaaaaaattat

SEQ ID NO: 10731 - DNA, 20 bp, Unknown
  Description of Unknown: gRNA target site sequence
ttgacatctttctgtgtgcc

SEQ ID NO: 10732 - DNA, 20 bp, Unknown
  Description of Unknown: gRNA target site sequence
tgacatctttctgtgtgcca

SEQ ID NO: 10733 - DNA, 20 bp, Unknown
  Description of Unknown: gRNA target site sequence
gcgtcatttaattttgaaaa

SEQ ID NO: 10734 - DNA, 20 bp, Unknown
  Description of Unknown: gRNA target site sequence
aaaacagttatcttccgcca

SEQ ID NO: 10735 - DNA, 20 bp, Unknown
  Description of Unknown: gRNA target site sequence
tccgccatagataactacta

SEQ ID NO: 10736 - DNA, 20 bp, Unknown
  Description of Unknown: gRNA target site sequence
tggttatcttctgcctctca

SEQ ID NO: 10737 - DNA, 20 bp, Unknown
  Description of Unknown: gRNA target site sequence
tcttctgcctctcacagatg

SEQ ID NO: 10738 - DNA, 20 bp, Unknown
  Description of Unknown: gRNA target site sequence
ctctcacagatgaagaaact

SEQ ID NO: 10739 - DNA, 20 bp, Unknown
  Description of Unknown: gRNA target site sequence
tctcacagatgaagaaacta

SEQ ID NO: 10740 - DNA, 20 bp, Unknown
  Description of Unknown: gRNA target site sequence
gatgaagaaactaaggcacc

SEQ ID NO: 10741 - DNA, 20 bp, Unknown
  Description of Unknown: gRNA target site sequence
aactaaggcaccgagatttt

SEQ ID NO: 10742 - DNA, 20 bp, Unknown
  Description of Unknown: gRNA target site sequence
ttttaagaaacttaattaca

SEQ ID NO: 10743 - DNA, 20 bp, Unknown
  Description of Unknown: gRNA target site sequence
tttaagaaacttaattacac

SEQ ID NO: 10744 - DNA, 20 bp, Unknown
  Description of Unknown: gRNA target site sequence
ttaagaaacttaattacaca

SEQ ID NO: 10745 - DNA, 20 bp, Unknown
  Description of Unknown: gRNA target site sequence
taagaaacttaattacacag

SEQ ID NO: 10746 - DNA, 20 bp, Unknown
  Description of Unknown: gRNA target site sequence
ttaattacacaggggataaa

SEQ ID NO: 10747 - DNA, 20 bp, Unknown
  Description of Unknown: gRNA target site sequence
attacacaggggataaatgg

SEQ ID NO: 10748 - DNA, 20 bp, Unknown
  Description of Unknown: gRNA target site sequence
ggggataaatggcagcaatc

SEQ ID NO: 10749 - DNA, 20 bp, Unknown
  Description of Unknown: gRNA target site sequence
aatggcagcaatcgagattg

SEQ ID NO: 10750 - DNA, 20 bp, Unknown
  Description of Unknown: gRNA target site sequence
cagcaatcgagattgaagtc

SEQ ID NO: 10751 - DNA, 20 bp, Unknown
  Description of Unknown: gRNA target site sequence
agattgaagtcaagcctaac

SEQ ID NO: 10752 - DNA, 20 bp, Unknown
  Description of Unknown: gRNA target site sequence
gattgaagtcaagcctaacc

SEQ ID NO: 10753 - DNA, 20 bp, Unknown
  Description of Unknown: gRNA target site sequence
attgaagtcaagcctaacca

SEQ ID NO: 10754 - DNA, 20 bp, Unknown
  Description of Unknown: gRNA target site sequence
aagcctaaccagggcttttg

SEQ ID NO: 10755 - DNA, 20 bp, Unknown
  Description of Unknown: gRNA target site sequence
agcctaaccagggcttttgc

SEQ ID NO: 10756 - DNA, 20 bp, Unknown
  Description of Unknown: gRNA target site sequence
cctaaccagggcttttgcgg

SEQ ID NO: 10757 - DNA, 20 bp, Unknown
  Description of Unknown: gRNA target site sequence
ttgcgggagcgcatgccttt

SEQ ID NO: 10758 - DNA, 20 bp, Unknown
  Description of Unknown: gRNA target site sequence
taattcgtgcattttttttt

SEQ ID NO: 10759 - DNA, 20 bp, Unknown
  Description of Unknown: gRNA target site sequence
aaaacgcctgccttctgcgt

SEQ ID NO: 10760 - DNA, 20 bp, Unknown
  Description of Unknown: gRNA target site sequence
gccttctgcgtgagattctc

SEQ ID NO: 10761 - DNA, 20 bp, Unknown
  Description of Unknown: gRNA target site sequence
cttctgcgtgagattctcca

SEQ ID NO: 10762 - DNA, 20 bp, Unknown
  Description of Unknown: gRNA target site sequence
tgagattctccagagcaaac

SEQ ID NO: 10763 - DNA, 20 bp, Unknown
  Description of Unknown: gRNA target site sequence
gagattctccagagcaaact

SEQ ID NO: 10764 - DNA, 20 bp, Unknown
  Description of Unknown: gRNA target site sequence
attctccagagcaaactggg

SEQ ID NO: 10765 - DNA, 20 bp, Unknown
  Description of Unknown: gRNA target site sequence
ccagagcaaactgggcggca

SEQ ID NO: 10766 - DNA, 20 bp, Unknown
  Description of Unknown: gRNA target site sequence
cagagcaaactgggcggcat

SEQ ID NO: 10767 - DNA, 20 bp, Unknown
  Description of Unknown: gRNA target site sequence
actgggcggcatgggccctg

SEQ ID NO: 10768 - DNA, 20 bp, Unknown
  Description of Unknown: gRNA target site sequence
ggccctgtggtcttttcgta

SEQ ID NO: 10769 - DNA, 20 bp, Unknown
  Description of Unknown: gRNA target site sequence
ccctgtggtcttttcgtaca

SEQ ID NO: 10770 - DNA, 20 bp, Unknown
  Description of Unknown: gRNA target site sequence
cctgtggtcttttcgtacag

SEQ ID NO: 10771 - DNA, 20 bp, Unknown
  Description of Unknown: gRNA target site sequence
ctgtggtcttttcgtacaga

SEQ ID NO: 10772 - DNA, 20 bp, Unknown
  Description of Unknown: gRNA target site sequence
cgtacagagggcttcctctt

SEQ ID NO: 10773 - DNA, 20 bp, Unknown
  Description of Unknown: gRNA target site sequence
ttcctctttggctctttgcc

SEQ ID NO: 10774 - DNA, 20 bp, Unknown
  Description of Unknown: gRNA target site sequence
ctctttgcctggttgtttcc

SEQ ID NO: 10775 - DNA, 20 bp, Unknown
  Description of Unknown: gRNA target site sequence
tgtactgtgcctcttacttt

SEQ ID NO: 10776 - DNA, 20 bp, Unknown
  Description of Unknown: gRNA target site sequence
actttcggttttgaaaacat

SEQ ID NO: 10777 - DNA, 20 bp, Unknown
  Description of Unknown: gRNA target site sequence
ctttcggttttgaaaacatg

SEQ ID NO: 10778 - DNA, 20 bp, Unknown
  Description of Unknown: gRNA target site sequence
tttcggttttgaaaacatga

SEQ ID NO: 10779 - DNA, 20 bp, Unknown
  Description of Unknown: gRNA target site sequence
ttcggttttgaaaacatgag

SEQ ID NO: 10780 - DNA, 20 bp, Unknown
  Description of Unknown: gRNA target site sequence
tcggttttgaaaacatgagg

SEQ ID NO: 10781 - DNA, 20 bp, Unknown
  Description of Unknown: gRNA target site sequence
ttttgaaaacatgagggggt

SEQ ID NO: 10782 - DNA, 20 bp, Unknown
  Description of Unknown: gRNA target site sequence
tttgaaaacatgagggggtt

SEQ ID NO: 10783 - DNA, 20 bp, Unknown
  Description of Unknown: gRNA target site sequence
aaacatgagggggttgggcg

SEQ ID NO: 10784 - DNA, 20 bp, Unknown
  Description of Unknown: gRNA target site sequence
catgagggggttgggcgtgg

SEQ ID NO: 10785 - DNA, 20 bp, Unknown
  Description of Unknown: gRNA target site sequence
gtagcttacgcctgtaatcc

SEQ ID NO: 10786 - DNA, 20 bp, Unknown
  Description of Unknown: gRNA target site sequence
acgcctgtaatcccagcact

SEQ ID NO: 10787 - DNA, 20 bp, Unknown
  Description of Unknown: gRNA target site sequence
cgcctgtaatcccagcactt

SEQ ID NO: 10788 - DNA, 20 bp, Unknown
  Description of Unknown: gRNA target site sequence
gcctgtaatcccagcactta

SEQ ID NO: 10789 - DNA, 20 bp, Unknown
  Description of Unknown: gRNA target site sequence
ctgtaatcccagcacttagg

SEQ ID NO: 10790 - DNA, 20 bp, Unknown
  Description of Unknown: gRNA target site sequence
tgtaatcccagcacttaggg

SEQ ID NO: 10791 - DNA, 20 bp, Unknown
  Description of Unknown: gRNA target site sequence
tcccagcacttagggaggcc

SEQ ID NO: 10792 - DNA, 20 bp, Unknown
  Description of Unknown: gRNA target site sequence
cccagcacttagggaggccg

SEQ ID NO: 10793 - DNA, 20 bp, Unknown
  Description of Unknown: gRNA target site sequence
agcacttagggaggccgagg

SEQ ID NO: 10794 - DNA, 20 bp, Unknown
  Description of Unknown: gRNA target site sequence
gcacttagggaggccgaggc

SEQ ID NO: 10795 - DNA, 20 bp, Unknown
  Description of Unknown: gRNA target site sequence
acttagggaggccgaggcgg

SEQ ID NO: 10796 - DNA, 20 bp, Unknown
  Description of Unknown: gRNA target site sequence
cttagggaggccgaggcggg

SEQ ID NO: 10797 - DNA, 20 bp, Unknown
  Description of Unknown: gRNA target site sequence
gggaggccgaggcgggagga

SEQ ID NO: 10798 - DNA, 20 bp, Unknown
  Description of Unknown: gRNA target site sequence
ccgaggcgggaggatggctt

SEQ ID NO: 10799 - DNA, 20 bp, Unknown
  Description of Unknown: gRNA target site sequence
cgaggcgggaggatggcttg

SEQ ID NO: 10800 - DNA, 20 bp, Unknown
  Description of Unknown: gRNA target site sequence
ggaggatggcttgaggtccg

SEQ ID NO: 10801 - DNA, 20 bp, Unknown
  Description of Unknown: gRNA target site sequence
atggcttgaggtccgtagtt

SEQ ID NO: 10802 - DNA, 20 bp, Unknown
  Description of Unknown: gRNA target site sequence
ttgaggtccgtagttgagac

SEQ ID NO: 10803 - DNA, 20 bp, Unknown
  Description of Unknown: gRNA target site sequence
gtccgtagttgagaccagcc

SEQ ID NO: 10804 - DNA, 20 bp, Unknown
  Description of Unknown: gRNA target site sequence
tgagaccagcctggccaaca

SEQ ID NO: 10805 - DNA, 20 bp, Unknown
  Description of Unknown: gRNA target site sequence
ccagcctggccaacatggtg

SEQ ID NO: 10806 - DNA, 20 bp, Unknown
  Description of Unknown: gRNA target site sequence
ctggccaacatggtgaagcc

SEQ ID NO: 10807 - DNA, 20 bp, Unknown
  Description of Unknown: gRNA target site sequence
caaaaaataataacaaaaat

SEQ ID NO: 10808 - DNA, 20 bp, Unknown
  Description of Unknown: gRNA target site sequence
aaataataacaaaaattagc

SEQ ID NO: 10809 - DNA, 20 bp, Unknown
  Description of Unknown: gRNA target site sequence
aataataacaaaaattagcc

SEQ ID NO: 10810 - DNA, 20 bp, Unknown
  Description of Unknown: gRNA target site sequence
taacaaaaattagccgggtg

SEQ ID NO: 10811 - DNA, 20 bp, Unknown
  Description of Unknown: gRNA target site sequence
caaaaattagccgggtgtgg

SEQ ID NO: 10812 - DNA, 20 bp, Unknown
  Description of Unknown: gRNA target site sequence
ggtgtggtggctcgtgcctg

SEQ ID NO: 10813 - DNA, 20 bp, Unknown
  Description of Unknown: gRNA target site sequence
gtggctcgtgcctgtggtcc

SEQ ID NO: 10814 - DNA, 20 bp, Unknown
  Description of Unknown: gRNA target site sequence
gcctgtggtcccagctgctc

SEQ ID NO: 10815 - DNA, 20 bp, Unknown
  Description of Unknown: gRNA target site sequence
tgtggtcccagctgctccgg

SEQ ID NO: 10816 - DNA, 20 bp, Unknown
  Description of Unknown: gRNA target site sequence
tcccagctgctccggtggct

SEQ ID NO: 10817 - DNA, 20 bp, Unknown
  Description of Unknown: gRNA target site sequence
cccagctgctccggtggctg

SEQ ID NO: 10818 - DNA, 20 bp, Unknown
  Description of Unknown: gRNA target site sequence
agctgctccggtggctgagg

SEQ ID NO: 10819 - DNA, 20 bp, Unknown
  Description of Unknown: gRNA target site sequence
gctgctccggtggctgaggc

SEQ ID NO: 10820 - DNA, 20 bp, Unknown
  Description of Unknown: gRNA target site sequence
tgctccggtggctgaggcgg

SEQ ID NO: 10821 - DNA, 20 bp, Unknown
  Description of Unknown: gRNA target site sequence
gctccggtggctgaggcggg

SEQ ID NO: 10822 - DNA, 20 bp, Unknown
  Description of Unknown: gRNA target site sequence
ctgaggcgggaggatctctt

SEQ ID NO: 10823 - DNA, 20 bp, Unknown
  Description of Unknown: gRNA target site sequence
gcgggaggatctcttgagct

SEQ ID NO: 10824 - DNA, 20 bp, Unknown
  Description of Unknown: gRNA target site sequence
cgggaggatctcttgagctt

SEQ ID NO: 10825 - DNA, 20 bp, Unknown
  Description of Unknown: gRNA target site sequence
tctcttgagcttaggctttt

SEQ ID NO: 10826 - DNA, 20 bp, Unknown
  Description of Unknown: gRNA target site sequence
cttaggcttttgagctatca

SEQ ID NO: 10827 - DNA, 20 bp, Unknown
  Description of Unknown: gRNA target site sequence
cttttgagctatcatggcgc

SEQ ID NO: 10828 - DNA, 20 bp, Unknown
  Description of Unknown: gRNA target site sequence
atcatggcgccagtgcactc

SEQ ID NO: 10829 - DNA, 20 bp, Unknown
  Description of Unknown: gRNA target site sequence
ggcgccagtgcactccagcg

SEQ ID NO: 10830 - DNA, 20 bp, Unknown
  Description of Unknown: gRNA target site sequence
gcgccagtgcactccagcgt

SEQ ID NO: 10831 - DNA, 20 bp, Unknown
  Description of Unknown: gRNA target site sequence
gtgcactccagcgtgggcaa

SEQ ID NO: 10832 - DNA, 20 bp, Unknown
  Description of Unknown: gRNA target site sequence
gcactccagcgtgggcaaca

SEQ ID NO: 10833 - DNA, 20 bp, Unknown
  Description of Unknown: gRNA target site sequence
tccagcgtgggcaacagagc

SEQ ID NO: 10834 - DNA, 20 bp, Unknown
  Description of Unknown: gRNA target site sequence
cgagaccctgtctctcaaaa

SEQ ID NO: 10835 - DNA, 20 bp, Unknown
  Description of Unknown: gRNA target site sequence
aaaaaagaaaaaaaaaaaaa

SEQ ID NO: 10836 - DNA, 20 bp, Unknown
  Description of Unknown: gRNA target site sequence
aagaaaaaaaaaaaaaaaga

SEQ ID NO: 10837 - DNA, 20 bp, Unknown
  Description of Unknown: gRNA target site sequence
gaaaaaaaaaaaaaaagaaa

SEQ ID NO: 10838 - DNA, 20 bp, Unknown
  Description of Unknown: gRNA target site sequence
aaaaaaaaaaagaaagagaa

SEQ ID NO: 10839 - DNA, 20 bp, Unknown
  Description of Unknown: gRNA target site sequence
aaaaaagaaagagaaaagaa

SEQ ID NO: 10840 - DNA, 20 bp, Unknown
  Description of Unknown: gRNA target site sequence
aagaaagagaaaagaaaaga

SEQ ID NO: 10841 - DNA, 20 bp, Unknown
  Description of Unknown: gRNA target site sequence
aagagaaaagaaaagaaaga

SEQ ID NO: 10842 - DNA, 20 bp, Unknown
  Description of Unknown: gRNA target site sequence
agaaaagaaaagaaagaaag

SEQ ID NO: 10843 - DNA, 20 bp, Unknown
  Description of Unknown: gRNA target site sequence
agaaaagaaagaaagaagtg

SEQ ID NO: 10844 - DNA, 20 bp, Unknown
  Description of Unknown: gRNA target site sequence
gaaaagaaagaaagaagtga

SEQ ID NO: 10845 - DNA, 20 bp, Unknown
  Description of Unknown: gRNA target site sequence
agaaagaagtgaaggtttgt

SEQ ID NO: 10846 - DNA, 20 bp, Unknown
  Description of Unknown: gRNA target site sequence
agaagtgaaggtttgtcagt

SEQ ID NO: 10847 - DNA, 20 bp, Unknown
  Description of Unknown: gRNA target site sequence
gaagtgaaggtttgtcagtc

SEQ ID NO: 10848 - DNA, 20 bp, Unknown
  Description of Unknown: gRNA target site sequence
aagtgaaggtttgtcagtca

SEQ ID NO: 10849 - DNA, 20 bp, Unknown
  Description of Unknown: gRNA target site sequence
agtgaaggtttgtcagtcag

SEQ ID NO: 10850 - DNA, 20 bp, Unknown
  Description of Unknown: gRNA target site sequence
tgaaggtttgtcagtcaggg

SEQ ID NO: 10851 - DNA, 20 bp, Unknown
  Description of Unknown: gRNA target site sequence
gagctgtaaaaccattaata

SEQ ID NO: 10852 - DNA, 20 bp, Unknown
  Description of Unknown: gRNA target site sequence
accattaataaagataatcc

SEQ ID NO: 10853 - DNA, 20 bp, Unknown
  Description of Unknown: gRNA target site sequence
ttaataaagataatccaaga

SEQ ID NO: 10854 - DNA, 20 bp, Unknown
  Description of Unknown: gRNA target site sequence
gataatccaagatggttacc

SEQ ID NO: 10855 - DNA, 20 bp, Unknown
  Description of Unknown: gRNA target site sequence
agatggttaccaagactgtt

SEQ ID NO: 10856 - DNA, 20 bp, Unknown
  Description of Unknown: gRNA target site sequence
gatggttaccaagactgttg

SEQ ID NO: 10857 - DNA, 20 bp, Unknown
  Description of Unknown: gRNA target site sequence
accaagactgttgaggacgc

SEQ ID NO: 10858 - DNA, 20 bp, Unknown
  Description of Unknown: gRNA target site sequence
caagactgttgaggacgcca

SEQ ID NO: 10859 - DNA, 20 bp, Unknown
  Description of Unknown: gRNA target site sequence
ttgaggacgccagagatctt

SEQ ID NO: 10860 - DNA, 20 bp, Unknown
  Description of Unknown: gRNA target site sequence
agagatcttgagcactttct

SEQ ID NO: 10861 - DNA, 20 bp, Unknown
  Description of Unknown: gRNA target site sequence
ttgagcactttctaagtacc

SEQ ID NO: 10862 - DNA, 20 bp, Unknown
  Description of Unknown: gRNA target site sequence
taagtacctggcaatacact

SEQ ID NO: 10863 - DNA, 20 bp, Unknown
  Description of Unknown: gRNA target site sequence
agcgcgctcaccttttcctc

SEQ ID NO: 10864 - DNA, 20 bp, Unknown
  Description of Unknown: gRNA target site sequence
ctctggcaaaacatgatcga

SEQ ID NO: 10865 - DNA, 20 bp, Unknown
  Description of Unknown: gRNA target site sequence
tggcaaaacatgatcgaaag

SEQ ID NO: 10866 - DNA, 20 bp, Unknown
  Description of Unknown: gRNA target site sequence
aagcagaatgttttgatcat

SEQ ID NO: 10867 - DNA, 20 bp, Unknown
  Description of Unknown: gRNA target site sequence
tacaatttatttacaacata

SEQ ID NO: 10868 - DNA, 20 bp, Unknown
  Description of Unknown: gRNA target site sequence
acaatttatttacaacataa

SEQ ID NO: 10869 - DNA, 20 bp, Unknown
  Description of Unknown: gRNA target site sequence
gtatatatcaccaccattac

SEQ ID NO: 10870 - DNA, 20 bp, Unknown
  Description of Unknown: gRNA target site sequence
ccaccattactggtatttgc

SEQ ID NO: 10871 - DNA, 20 bp, Unknown
  Description of Unknown: gRNA target site sequence
ctggtatttgctggttatgt

SEQ ID NO: 10872 - DNA, 20 bp, Unknown
  Description of Unknown: gRNA target site sequence
tcttattttgaaaatttcca

SEQ ID NO: 10873 - DNA, 20 bp, Unknown
  Description of Unknown: gRNA target site sequence
aaagtaatacatgccatgca

SEQ ID NO: 10874 - DNA, 20 bp, Unknown
  Description of Unknown: gRNA target site sequence
tgccatgcatagaccatttc

SEQ ID NO: 10875 - DNA, 20 bp, Unknown
  Description of Unknown: gRNA target site sequence
catgcatagaccatttctgg

SEQ ID NO: 10876 - DNA, 20 bp, Unknown
  Description of Unknown: gRNA target site sequence
ccatttctggaagataccac

SEQ ID NO: 10877 - DNA, 20 bp, Unknown
  Description of Unknown: gRNA target site sequence
tgtaatgatgattgcctctg

SEQ ID NO: 10878 - DNA, 20 bp, Unknown
  Description of Unknown: gRNA target site sequence
gtaatgatgattgcctctga

SEQ ID NO: 10879 - DNA, 20 bp, Unknown
  Description of Unknown: gRNA target site sequence
ttcctcctctgacctgtgtg

SEQ ID NO: 10880 - DNA, 20 bp, Unknown
  Description of Unknown: gRNA target site sequence
tcctcctctgacctgtgtgt

SEQ ID NO: 10881 - DNA, 20 bp, Unknown
  Description of Unknown: gRNA target site sequence
gttttgtttttgttttactg

SEQ ID NO: 10882 - DNA, 20 bp, Unknown
  Description of Unknown: gRNA target site sequence
ttttgtttttgttttactgt

SEQ ID NO: 10883 - DNA, 20 bp, Unknown
  Description of Unknown: gRNA target site sequence
gtgggcataaattaattttt

SEQ ID NO: 10884 - DNA, 20 bp, Unknown
  Description of Unknown: gRNA target site sequence
cataaattaatttttcagtt

SEQ ID NO: 10885 - DNA, 20 bp, Unknown
  Description of Unknown: gRNA target site sequence
ttaatttttcagttaagttt

SEQ ID NO: 10886 - DNA, 20 bp, Unknown
  Description of Unknown: gRNA target site sequence
atttttcagttaagttttgg

SEQ ID NO: 10887 - DNA, 20 bp, Unknown
  Description of Unknown: gRNA target site sequence
aagcttaaataactctccaa

SEQ ID NO: 10888 - DNA, 20 bp, Unknown
  Description of Unknown: gRNA target site sequence
ataactctccaaaagtcata

SEQ ID NO: 10889 - DNA, 20 bp, Unknown
  Description of Unknown: gRNA target site sequence
ctctccaaaagtcataaagc

SEQ ID NO: 10890 - DNA, 20 bp, Unknown
  Description of Unknown: gRNA target site sequence
aaagtcataaagccagtaac

SEQ ID NO: 10891 - DNA, 20 bp, Unknown
  Description of Unknown: gRNA target site sequence
cataaagccagtaactggtt

SEQ ID NO: 10892 - DNA, 20 bp, Unknown
  Description of Unknown: gRNA target site sequence
gttgagcccaaattcaaacc

SEQ ID NO: 10893 - DNA, 20 bp, Unknown
  Description of Unknown: gRNA target site sequence
tctgatacttgtcctcttct

SEQ ID NO: 10894 - DNA, 20 bp, Unknown
  Description of Unknown: gRNA target site sequence
tacttgtcctcttcttagaa

SEQ ID NO: 10895 - DNA, 20 bp, Unknown
  Description of Unknown: gRNA target site sequence
cctcttcttagaaaagatta

SEQ ID NO: 10896 - DNA, 20 bp, Unknown
  Description of Unknown: gRNA target site sequence
tcttgccgccttccctcaaa

SEQ ID NO: 10897 - DNA, 20 bp, Unknown
  Description of Unknown: gRNA target site sequence
ttgccgccttccctcaaaca

SEQ ID NO: 10898 - DNA, 20 bp, Unknown
  Description of Unknown: gRNA target site sequence
gccgccttccctcaaacaga

SEQ ID NO: 10899 - DNA, 20 bp, Unknown
  Description of Unknown: gRNA target site sequence
ttccctcaaacagagagttc

SEQ ID NO: 10900 - DNA, 20 bp, Unknown
  Description of Unknown: gRNA target site sequence
tccctcaaacagagagttcc

SEQ ID NO: 10901 - DNA, 20 bp, Unknown
  Description of Unknown: gRNA target site sequence
ctcaaacagagagttccagg

SEQ ID NO: 10902 - DNA, 20 bp, Unknown
  Description of Unknown: gRNA target site sequence
tcaaacagagagttccaggc

SEQ ID NO: 10903 - DNA, 20 bp, Unknown
  Description of Unknown: gRNA target site sequence
gaatctgtgctctgatccct

SEQ ID NO: 10904 - DNA, 20 bp, Unknown
  Description of Unknown: gRNA target site sequence
aatctgtgctctgatccctg

SEQ ID NO: 10905 - DNA, 20 bp, Unknown
  Description of Unknown: gRNA target site sequence
atttaatatgttcttattat

SEQ ID NO: 10906 - DNA, 20 bp, Unknown
  Description of Unknown: gRNA target site sequence
taatatgttcttattattag

SEQ ID NO: 10907 - DNA, 20 bp, Unknown
  Description of Unknown: gRNA target site sequence
tgttcttattattagaagct

SEQ ID NO: 10908 - DNA, 20 bp, Unknown
  Description of Unknown: gRNA target site sequence
ttattagaagctcagatgca

SEQ ID NO: 10909 - DNA, 20 bp, Unknown
  Description of Unknown: gRNA target site sequence
attagaagctcagatgcaaa

SEQ ID NO: 10910 - DNA, 20 bp, Unknown
  Description of Unknown: gRNA target site sequence
tcagatgcaaagagctctct

SEQ ID NO: 10911 - DNA, 20 bp, Unknown
  Description of Unknown: gRNA target site sequence
tttaatgttatgaaaaaaat

SEQ ID NO: 10912 - DNA, 20 bp, Unknown
  Description of Unknown: gRNA target site sequence
ttaatgttatgaaaaaaatc

SEQ ID NO: 10913 - DNA, 20 bp, Unknown
  Description of Unknown: gRNA target site sequence
gaaaaaaatcaggtcttcat

SEQ ID NO: 10914 - DNA, 20 bp, Unknown
  Description of Unknown: gRNA target site sequence
ttccccaatccacctcttga

SEQ ID NO: 10915 - DNA, 20 bp, Unknown
  Description of Unknown: gRNA target site sequence
tccccaatccacctcttgat

SEQ ID NO: 10916 - DNA, 20 bp, Unknown
  Description of Unknown: gRNA target site sequence
ccccaatccacctcttgatg

SEQ ID NO: 10917 - DNA, 20 bp, Unknown
  Description of Unknown: gRNA target site sequence
aatccacctcttgatggggc

SEQ ID NO: 10918 - DNA, 20 bp, Unknown
  Description of Unknown: gRNA target site sequence
ccacctcttgatggggctag

SEQ ID NO: 10919 - DNA, 20 bp, Unknown
  Description of Unknown: gRNA target site sequence
tagtagcctttccttaatga

SEQ ID NO: 10920 - DNA, 20 bp, Unknown
  Description of Unknown: gRNA target site sequence
agtagcctttccttaatgat

SEQ ID NO: 10921 - DNA, 20 bp, Unknown
  Description of Unknown: gRNA target site sequence
gtagcctttccttaatgata

SEQ ID NO: 10922 - DNA, 20 bp, Unknown
  Description of Unknown: gRNA target site sequence
ccttaatgatagggtgtttc

SEQ ID NO: 10923 - DNA, 20 bp, Unknown
  Description of Unknown: gRNA target site sequence
ttaatgatagggtgtttcta

SEQ ID NO: 10924 - DNA, 20 bp, Unknown
  Description of Unknown: gRNA target site sequence
aatgatagggtgtttctaga

SEQ ID NO: 10925 - DNA, 20 bp, Unknown
  Description of Unknown: gRNA target site sequence
tgtttctagagagatatatc

SEQ ID NO: 10926 - DNA, 20 bp, Unknown
  Description of Unknown: gRNA target site sequence
ctagagagatatatctggtc

SEQ ID NO: 10927 - DNA, 20 bp, Unknown
  Description of Unknown: gRNA target site sequence
tagagagatatatctggtca

SEQ ID NO: 10928 - DNA, 20 bp, Unknown
  Description of Unknown: gRNA target site sequence
agagatatatctggtcaagg

SEQ ID NO: 10929 - DNA, 20 bp, Unknown
  Description of Unknown: gRNA target site sequence
tatatctggtcaaggtggcc

SEQ ID NO: 10930 - DNA, 20 bp, Unknown
  Description of Unknown: gRNA target site sequence
ggtactcctccttctcccca

SEQ ID NO: 10931 - DNA, 20 bp, Unknown
  Description of Unknown: gRNA target site sequence
tccttctccccacagcctcc

SEQ ID NO: 10932 - DNA, 20 bp, Unknown
  Description of Unknown: gRNA target site sequence
ctccccacagcctcccagac

SEQ ID NO: 10933 - DNA, 20 bp, Unknown
  Description of Unknown: gRNA target site sequence
tccccacagcctcccagaca

SEQ ID NO: 10934 - DNA, 20 bp, Unknown
  Description of Unknown: gRNA target site sequence
cccacagcctcccagacaag

SEQ ID NO: 10935 - DNA, 20 bp, Unknown
  Description of Unknown: gRNA target site sequence
ccacagcctcccagacaagg

SEQ ID NO: 10936 - DNA, 20 bp, Unknown
  Description of Unknown: gRNA target site sequence
acagcctcccagacaaggag

SEQ ID NO: 10937 - DNA, 20 bp, Unknown
  Description of Unknown: gRNA target site sequence
gcctcccagacaaggaggag

SEQ ID NO: 10938 - DNA, 20 bp, Unknown
  Description of Unknown: gRNA target site sequence
aaggaggagtagctgccttt

SEQ ID NO: 10939 - DNA, 20 bp, Unknown
  Description of Unknown: gRNA target site sequence
tgatcatgtaccctgaatat

SEQ ID NO: 10940 - DNA, 20 bp, Unknown
  Description of Unknown: gRNA target site sequence
ctgaatataagtgtatttaa

SEQ ID NO: 10941 - DNA, 20 bp, Unknown
  Description of Unknown: gRNA target site sequence
gaattttatacacatatatt

SEQ ID NO: 10942 - DNA, 20 bp, Unknown
  Description of Unknown: gRNA target site sequence
ttagtgtcaatctgtatatt

SEQ ID NO: 10943 - DNA, 20 bp, Unknown
  Description of Unknown: gRNA target site sequence
gtgtcaatctgtatatttag

SEQ ID NO: 10944 - DNA, 20 bp, Unknown
  Description of Unknown: gRNA target site sequence
ttcattttcaatgaaaaata

SEQ ID NO: 10945 - DNA, 20 bp, Unknown
  Description of Unknown: gRNA target site sequence
cattttcaatgaaaaatata

SEQ ID NO: 10946 - DNA, 20 bp, Unknown
  Description of Unknown: gRNA target site sequence
attttcttcccacttcccca

SEQ ID NO: 10947 - DNA, 20 bp, Unknown
  Description of Unknown: gRNA target site sequence
tcttcccacttccccatgga

SEQ ID NO: 10948 - DNA, 20 bp, Unknown
  Description of Unknown: gRNA target site sequence
ccacttccccatggatggtc

SEQ ID NO: 10949 - DNA, 20 bp, Unknown
  Description of Unknown: gRNA target site sequence
tctagtcatgcctctcattt

SEQ ID NO: 10950 - DNA, 20 bp, Unknown
  Description of Unknown: gRNA target site sequence
gtcatgcctctcattttgga

SEQ ID NO: 10951 - DNA, 20 bp, Unknown
  Description of Unknown: gRNA target site sequence
aagtactgtttctgaaacat

SEQ ID NO: 10952 - DNA, 20 bp, Unknown
  Description of Unknown: gRNA target site sequence
agtactgtttctgaaacatt

SEQ ID NO: 10953 - DNA, 20 bp, Unknown
  Description of Unknown: gRNA target site sequence
taggcaatatattcccaacc

SEQ ID NO: 10954 - DNA, 20 bp, Unknown
  Description of Unknown: gRNA target site sequence
caatatattcccaacctggc

SEQ ID NO: 10955 - DNA, 20 bp, Unknown
  Description of Unknown: gRNA target site sequence
ttcccaacctggctagttta

SEQ ID NO: 10956 - DNA, 20 bp, Unknown
  Description of Unknown: gRNA target site sequence
tagtttacagcaatcacctg

SEQ ID NO: 10957 - DNA, 20 bp, Unknown
  Description of Unknown: gRNA target site sequence
attactccatttgatcataa

SEQ ID NO: 10958 - DNA, 20 bp, Unknown
  Description of Unknown: gRNA target site sequence
ctccatttgatcataatgga

SEQ ID NO: 10959 - DNA, 20 bp, Unknown
  Description of Unknown: gRNA target site sequence
atgttctgtcccatttgcca

SEQ ID NO: 10960 - DNA, 20 bp, Unknown
  Description of Unknown: gRNA target site sequence
ctatccctgttgtattttat

SEQ ID NO: 10961 - DNA, 20 bp, Unknown
  Description of Unknown: gRNA target site sequence
tatccctgttgtattttatc

SEQ ID NO: 10962 - DNA, 20 bp, Unknown
  Description of Unknown: gRNA target site sequence
cgggtccaactcaaccattt

SEQ ID NO: 10963 - DNA, 20 bp, Unknown
  Description of Unknown: gRNA target site sequence
gggtccaactcaaccattta

SEQ ID NO: 10964 - DNA, 20 bp, Unknown
  Description of Unknown: gRNA target site sequence
caaccatttaaggtatttgc

SEQ ID NO: 10965 - DNA, 20 bp, Unknown
  Description of Unknown: gRNA target site sequence
tgccagctcttgtatgcatt

SEQ ID NO: 10966 - DNA, 20 bp, Unknown
  Description of Unknown: gRNA target site sequence
gccagctcttgtatgcattt

SEQ ID NO: 10967 - DNA, 20 bp, Unknown
  Description of Unknown: gRNA target site sequence
ggttttgtttctttgttttt

SEQ ID NO: 10968 - DNA, 20 bp, Unknown
  Description of Unknown: gRNA target site sequence
tgttttttagctcatgaaat

SEQ ID NO: 10969 - DNA, 20 bp, Unknown
  Description of Unknown: gRNA target site sequence
gttttttagctcatgaaatt

SEQ ID NO: 10970 - DNA, 20 bp, Unknown
  Description of Unknown: gRNA target site sequence
agctcatgaaattaggtaca

SEQ ID NO: 10971 - DNA, 20 bp, Unknown
  Description of Unknown: gRNA target site sequence
catgaaattaggtacaaagt

SEQ ID NO: 10972 - DNA, 20 bp, Unknown
  Description of Unknown: gRNA target site sequence
tgaaattaggtacaaagtca

SEQ ID NO: 10973 - DNA, 20 bp, Unknown
  Description of Unknown: gRNA target site sequence
aaattaggtacaaagtcaga

SEQ ID NO: 10974 - DNA, 20 bp, Unknown
  Description of Unknown: gRNA target site sequence
aattaggtacaaagtcagag

SEQ ID NO: 10975 - DNA, 20 bp, Unknown
  Description of Unknown: gRNA target site sequence
attaggtacaaagtcagaga

SEQ ID NO: 10976 - DNA, 20 bp, Unknown
  Description of Unknown: gRNA target site sequence
ttaggtacaaagtcagagag

SEQ ID NO: 10977 - DNA, 20 bp, Unknown
  Description of Unknown: gRNA target site sequence
tacaaagtcagagaggggtc

SEQ ID NO: 10978 - DNA, 20 bp, Unknown
  Description of Unknown: gRNA target site sequence
gggtctggcatataaaacct

SEQ ID NO: 10979 - DNA, 20 bp, Unknown
  Description of Unknown: gRNA target site sequence
tctggcatataaaacctcag

SEQ ID NO: 10980 - DNA, 20 bp, Unknown
  Description of Unknown: gRNA target site sequence
ataaaacctcagcagaaata

SEQ ID NO: 10981 - DNA, 20 bp, Unknown
  Description of Unknown: gRNA target site sequence
aaaacctcagcagaaataaa

SEQ ID NO: 10982 - DNA, 20 bp, Unknown
  Description of Unknown: gRNA target site sequence
aaacctcagcagaaataaag

SEQ ID NO: 10983 - DNA, 20 bp, Unknown
  Description of Unknown: gRNA target site sequence
aataaagaggttttgttgtt

SEQ ID NO: 10984 - DNA, 20 bp, Unknown
  Description of Unknown: gRNA target site sequence
aagaggttttgttgtttggt

SEQ ID NO: 10985 - DNA, 20 bp, Unknown
  Description of Unknown: gRNA target site sequence
tgtttggtaagaacatacct

SEQ ID NO: 10986 - DNA, 20 bp, Unknown
  Description of Unknown: gRNA target site sequence
gtttggtaagaacatacctt

SEQ ID NO: 10987 - DNA, 20 bp, Unknown
  Description of Unknown: gRNA target site sequence
ggtaagaacataccttgggt

SEQ ID NO: 10988 - DNA, 20 bp, Unknown
  Description of Unknown: gRNA target site sequence
agaacataccttgggttggt

SEQ ID NO: 10989 - DNA, 20 bp, Unknown
  Description of Unknown: gRNA target site sequence
gaacataccttgggttggtt

SEQ ID NO: 10990 - DNA, 20 bp, Unknown
  Description of Unknown: gRNA target site sequence
taccttgggttggttgggca

SEQ ID NO: 10991 - DNA, 20 bp, Unknown
  Description of Unknown: gRNA target site sequence
cttgggttggttgggcacgg

SEQ ID NO: 10992 - DNA, 20 bp, Unknown
  Description of Unknown: gRNA target site sequence
tgcctgtaatcccaacactt

SEQ ID NO: 10993 - DNA, 20 bp, Unknown
  Description of Unknown: gRNA target site sequence
gcctgtaatcccaacacttt

SEQ ID NO: 10994 - DNA, 20 bp, Unknown
  Description of Unknown: gRNA target site sequence
ctgtaatcccaacactttgg

SEQ ID NO: 10995 - DNA, 20 bp, Unknown
  Description of Unknown: gRNA target site sequence
tgtaatcccaacactttggg

SEQ ID NO: 10996 - DNA, 20 bp, Unknown
  Description of Unknown: gRNA target site sequence
tcccaacactttgggaggcc

SEQ ID NO: 10997 - DNA, 20 bp, Unknown
  Description of Unknown: gRNA target site sequence
cccaacactttgggaggcca

SEQ ID NO: 10998 - DNA, 20 bp, Unknown
  Description of Unknown: gRNA target site sequence
aacactttgggaggccaagg

SEQ ID NO: 10999 - DNA, 20 bp, Unknown
  Description of Unknown: gRNA target site sequence
acactttgggaggccaaggc

SEQ ID NO: 11000 - DNA, 20 bp, Unknown
  Description of Unknown: gRNA target site sequence
caaggcaggctgatcacttg

SEQ ID NO: 11001 - DNA, 20 bp, Unknown
  Description of Unknown: gRNA target site sequence
gcaggctgatcacttgaagt

SEQ ID NO: 11002 - DNA, 20 bp, Unknown
  Description of Unknown: gRNA target site sequence
caggctgatcacttgaagtt

SEQ ID NO: 11003 - DNA, 20 bp, Unknown
  Description of Unknown: gRNA target site sequence
ggctgatcacttgaagttgg

SEQ ID NO: 11004 - DNA, 20 bp, Unknown
  Description of Unknown: gRNA target site sequence
tcacttgaagttgggagttc

SEQ ID NO: 11005 - DNA, 20 bp, Unknown
  Description of Unknown: gRNA target site sequence
tgaagttgggagttcaagac

SEQ ID NO: 11006 - DNA, 20 bp, Unknown
  Description of Unknown: gRNA target site sequence
ttgggagttcaagaccagcc

SEQ ID NO: 11007 - DNA, 20 bp, Unknown
  Description of Unknown: gRNA target site sequence
caagaccagcctggccaaca

SEQ ID NO: 11008 - DNA, 20 bp, Unknown
  Description of Unknown: gRNA target site sequence
ctgaaaatacaaaaattaac

SEQ ID NO: 11009 - DNA, 20 bp, Unknown
  Description of Unknown: gRNA target site sequence
tgaaaatacaaaaattaacc

SEQ ID NO: 11010 - DNA, 20 bp, Unknown
  Description of Unknown: gRNA target site sequence
atacaaaaattaaccaggca

SEQ ID NO: 11011 - DNA, 20 bp, Unknown
  Description of Unknown: gRNA target site sequence
caaaaattaaccaggcatgg

SEQ ID NO: 11012 - DNA, 20 bp, Unknown
  Description of Unknown: gRNA target site sequence
ggcatggtggtgtgtgcctg

SEQ ID NO: 11013 - DNA, 20 bp, Unknown
  Description of Unknown: gRNA target site sequence
gtggtgtgtgcctgtagtcc

SEQ ID NO: 11014 - DNA, 20 bp, Unknown
  Description of Unknown: gRNA target site sequence
tggtgtgtgcctgtagtccc

SEQ ID NO: 11015 - DNA, 20 bp, Unknown
  Description of Unknown: gRNA target site sequence
tcccaggaatcacttgaacc

SEQ ID NO: 11016 - DNA, 20 bp, Unknown
  Description of Unknown: gRNA target site sequence
cccaggaatcacttgaaccc

SEQ ID NO: 11017 - DNA, 20 bp, Unknown
  Description of Unknown: gRNA target site sequence
caggaatcacttgaacccag

SEQ ID NO: 11018 - DNA, 20 bp, Unknown
  Description of Unknown: gRNA target site sequence
aggaatcacttgaacccagg

SEQ ID NO: 11019 - DNA, 20 bp, Unknown
  Description of Unknown: gRNA target site sequence
aatcacttgaacccaggagg

SEQ ID NO: 11020 - DNA, 20 bp, Unknown
  Description of Unknown: gRNA target site sequence
tcacttgaacccaggaggcg

SEQ ID NO: 11021 - DNA, 20 bp, Unknown
  Description of Unknown: gRNA target site sequence
cacttgaacccaggaggcgg

SEQ ID NO: 11022 - DNA, 20 bp, Unknown
  Description of Unknown: gRNA target site sequence
aacccaggaggcggaggttg

SEQ ID NO: 11023 - DNA, 20 bp, Unknown
  Description of Unknown: gRNA target site sequence
caggaggcggaggttgcagt

SEQ ID NO: 11024 - DNA, 20 bp, Unknown
  Description of Unknown: gRNA target site sequence
ggcggaggttgcagtgagct

SEQ ID NO: 11025 - DNA, 20 bp, Unknown
  Description of Unknown: gRNA target site sequence
caccactgcacactgcactc

SEQ ID NO: 11026 - DNA, 20 bp, Unknown
  Description of Unknown: gRNA target site sequence
ctgcacactgcactccagcc

SEQ ID NO: 11027 - DNA, 20 bp, Unknown
  Description of Unknown: gRNA target site sequence
tgcacactgcactccagcct

SEQ ID NO: 11028 - DNA, 20 bp, Unknown
  Description of Unknown: gRNA target site sequence
ctgcactccagcctgggcaa

SEQ ID NO: 11029 - DNA, 20 bp, Unknown
  Description of Unknown: gRNA target site sequence
tccagcctgggcaatggaat

SEQ ID NO: 11030 - DNA, 20 bp, Unknown
  Description of Unknown: gRNA target site sequence
aataaaaaaataaaaaaata

SEQ ID NO: 11031 - DNA, 20 bp, Unknown
  Description of Unknown: gRNA target site sequence
aaaaaataaagaacatacct

SEQ ID NO: 11032 - DNA, 20 bp, Unknown
  Description of Unknown: gRNA target site sequence
aaaaataaagaacatacctt

SEQ ID NO: 11033 - DNA, 20 bp, Unknown
  Description of Unknown: gRNA target site sequence
ataccttgggttgatccact

SEQ ID NO: 11034 - DNA, 20 bp, Unknown
  Description of Unknown: gRNA target site sequence
taccttgggttgatccactt

SEQ ID NO: 11035 - DNA, 20 bp, Unknown
  Description of Unknown: gRNA target site sequence
gttgatccacttaggaacct

SEQ ID NO: 11036 - DNA, 20 bp, Unknown
  Description of Unknown: gRNA target site sequence
ataataacatctgccacgta

SEQ ID NO: 11037 - DNA, 20 bp, Unknown
  Description of Unknown: gRNA target site sequence
aataacatctgccacgtata

SEQ ID NO: 11038 - DNA, 20 bp, Unknown
  Description of Unknown: gRNA target site sequence
atagagcaattgctatgtcc

SEQ ID NO: 11039 - DNA, 20 bp, Unknown
  Description of Unknown: gRNA target site sequence
tagagcaattgctatgtccc

SEQ ID NO: 11040 - DNA, 20 bp, Unknown
  Description of Unknown: gRNA target site sequence
ctatgtcccaggcactctac

SEQ ID NO: 11041 - DNA, 20 bp, Unknown
  Description of Unknown: gRNA target site sequence
actctactagacacttcata

SEQ ID NO: 11042 - DNA, 20 bp, Unknown
  Description of Unknown: gRNA target site sequence
actagacacttcatacagtt

SEQ ID NO: 11043 - DNA, 20 bp, Unknown
  Description of Unknown: gRNA target site sequence
cttcatacagtttagaaaat

SEQ ID NO: 11044 - DNA, 20 bp, Unknown
  Description of Unknown: gRNA target site sequence
atacagtttagaaaatcaga

SEQ ID NO: 11045 - DNA, 20 bp, Unknown
  Description of Unknown: gRNA target site sequence
tacagtttagaaaatcagat

SEQ ID NO: 11046 - DNA, 20 bp, Unknown
  Description of Unknown: gRNA target site sequence
tttagaaaatcagatgggtg

SEQ ID NO: 11047 - DNA, 20 bp, Unknown
  Description of Unknown: gRNA target site sequence
aaatcagatgggtgtagatc

SEQ ID NO: 11048 - DNA, 20 bp, Unknown
  Description of Unknown: gRNA target site sequence
aatcagatgggtgtagatca

SEQ ID NO: 11049 - DNA, 20 bp, Unknown
  Description of Unknown: gRNA target site sequence
cagatgggtgtagatcaagg

SEQ ID NO: 11050 - DNA, 20 bp, Unknown
  Description of Unknown: gRNA target site sequence
agatgggtgtagatcaaggc

SEQ ID NO: 11051 - DNA, 20 bp, Unknown
  Description of Unknown: gRNA target site sequence
atgggtgtagatcaaggcag

SEQ ID NO: 11052 - DNA, 20 bp, Unknown
  Description of Unknown: gRNA target site sequence
ggtgtagatcaaggcaggag

SEQ ID NO: 11053 - DNA, 20 bp, Unknown
  Description of Unknown: gRNA target site sequence
gtgtagatcaaggcaggagc

SEQ ID NO: 11054 - DNA, 20 bp, Unknown
  Description of Unknown: gRNA target site sequence
aggcaggagcaggaaccaaa

SEQ ID NO: 11055 - DNA, 20 bp, Unknown
  Description of Unknown: gRNA target site sequence
aggagcaggaaccaaaaaga

SEQ ID NO: 11056 - DNA, 20 bp, Unknown
  Description of Unknown: gRNA target site sequence
ggagcaggaaccaaaaagaa

SEQ ID NO: 11057 - DNA, 20 bp, Unknown
  Description of Unknown: gRNA target site sequence
aaaaagaaaggcataaacat

SEQ ID NO: 11058 - DNA, 20 bp, Unknown
  Description of Unknown: gRNA target site sequence
cataaacataagaaaaaaaa

SEQ ID NO: 11059 - DNA, 20 bp, Unknown
  Description of Unknown: gRNA target site sequence
aaacataagaaaaaaaatgg

SEQ ID NO: 11060 - DNA, 20 bp, Unknown
  Description of Unknown: gRNA target site sequence
aacataagaaaaaaaatgga

SEQ ID NO: 11061 - DNA, 20 bp, Unknown
  Description of Unknown: gRNA target site sequence
acataagaaaaaaaatggaa

SEQ ID NO: 11062 - DNA, 20 bp, Unknown
  Description of Unknown: gRNA target site sequence
cataagaaaaaaaatggaag

SEQ ID NO: 11063 - DNA, 20 bp, Unknown
  Description of Unknown: gRNA target site sequence
aagaaaaaaaatggaagggg

SEQ ID NO: 11064 - DNA, 20 bp, Unknown
  Description of Unknown: gRNA target site sequence
aaaaatggaaggggtggaaa

SEQ ID NO: 11065 - DNA, 20 bp, Unknown
  Description of Unknown: gRNA target site sequence
aaatggaaggggtggaaaca

SEQ ID NO: 11066 - DNA, 20 bp, Unknown
  Description of Unknown: gRNA target site sequence
gaaacagagtacaataacat

SEQ ID NO: 11067 - DNA, 20 bp, Unknown
  Description of Unknown: gRNA target site sequence
caataacatgagtaatttga

SEQ ID NO: 11068 - DNA, 20 bp, Unknown
  Description of Unknown: gRNA target site sequence
aataacatgagtaatttgat

SEQ ID NO: 11069 - DNA, 20 bp, Unknown
  Description of Unknown: gRNA target site sequence
ataacatgagtaatttgatg

SEQ ID NO: 11070 - DNA, 20 bp, Unknown
  Description of Unknown: gRNA target site sequence
taacatgagtaatttgatgg

SEQ ID NO: 11071 - DNA, 20 bp, Unknown
  Description of Unknown: gRNA target site sequence
gatgggggctattatgaact

SEQ ID NO: 11072 - DNA, 20 bp, Unknown
  Description of Unknown: gRNA target site sequence
actgagaaatgaactttgaa

SEQ ID NO: 11073 - DNA, 20 bp, Unknown
  Description of Unknown: gRNA target site sequence
atgaactttgaaaagtatct

SEQ ID NO: 11074 - DNA, 20 bp, Unknown
  Description of Unknown: gRNA target site sequence
tgaactttgaaaagtatctt

SEQ ID NO: 11075 - DNA, 20 bp, Unknown
  Description of Unknown: gRNA target site sequence
gaactttgaaaagtatcttg

SEQ ID NO: 11076 - DNA, 20 bp, Unknown
  Description of Unknown: gRNA target site sequence
tatcttggggccaaatcatg

SEQ ID NO: 11077 - DNA, 20 bp, Unknown
  Description of Unknown: gRNA target site sequence
gccaaatcatgtagactctt

SEQ ID NO: 11078 - DNA, 20 bp, Unknown
  Description of Unknown: gRNA target site sequence
agactcttgagtgatgtgtt

SEQ ID NO: 11079 - DNA, 20 bp, Unknown
  Description of Unknown: gRNA target site sequence
gactcttgagtgatgtgtta

SEQ ID NO: 11080 - DNA, 20 bp, Unknown
  Description of Unknown: gRNA target site sequence
gatgtgttaaggaatgctat

SEQ ID NO: 11081 - DNA, 20 bp, Unknown
  Description of Unknown: gRNA target site sequence
taaggaatgctatgagtgct

SEQ ID NO: 11082 - DNA, 20 bp, Unknown
  Description of Unknown: gRNA target site sequence
aggaatgctatgagtgctga

SEQ ID NO: 11083 - DNA, 20 bp, Unknown
  Description of Unknown: gRNA target site sequence
ggaatgctatgagtgctgag

SEQ ID NO: 11084 - DNA, 20 bp, Unknown
  Description of Unknown: gRNA target site sequence
gaatgctatgagtgctgaga

SEQ ID NO: 11085 - DNA, 20 bp, Unknown
  Description of Unknown: gRNA target site sequence
tatgagtgctgagagggcat

SEQ ID NO: 11086 - DNA, 20 bp, Unknown
  Description of Unknown: gRNA target site sequence
gagtgctgagagggcatcag

SEQ ID NO: 11087 - DNA, 20 bp, Unknown
  Description of Unknown: gRNA target site sequence
agagggcatcagaagtcctt

SEQ ID NO: 11088 - DNA, 20 bp, Unknown
  Description of Unknown: gRNA target site sequence
agggcatcagaagtccttga

SEQ ID NO: 11089 - DNA, 20 bp, Unknown
  Description of Unknown: gRNA target site sequence
cagaagtccttgagagcctc

SEQ ID NO: 11090 - DNA, 20 bp, Unknown
  Description of Unknown: gRNA target site sequence
gaagtccttgagagcctcca

SEQ ID NO: 11091 - DNA, 20 bp, Unknown
  Description of Unknown: gRNA target site sequence
tccttgagagcctccagaga

SEQ ID NO: 11092 - DNA, 20 bp, Unknown
  Description of Unknown: gRNA target site sequence
ccttgagagcctccagagaa

SEQ ID NO: 11093 - DNA, 20 bp, Unknown
  Description of Unknown: gRNA target site sequence
gagaaaggctcttaaaaatg

SEQ ID NO: 11094 - DNA, 20 bp, Unknown
  Description of Unknown: gRNA target site sequence
taaaaatgcagcgcaatctc

SEQ ID NO: 11095 - DNA, 20 bp, Unknown
  Description of Unknown: gRNA target site sequence
tgcagcgcaatctccagtga

SEQ ID NO: 11096 - DNA, 20 bp, Unknown
  Description of Unknown: gRNA target site sequence
agcgcaatctccagtgacag

SEQ ID NO: 11097 - DNA, 20 bp, Unknown
  Description of Unknown: gRNA target site sequence
ccagtgacagaagatactgc

SEQ ID NO: 11098 - DNA, 20 bp, Unknown
  Description of Unknown: gRNA target site sequence
agatactgctagaaatctgc

SEQ ID NO: 11099 - DNA, 20 bp, Unknown
  Description of Unknown: gRNA target site sequence
ctgctagaaaaaaaacaaaa

SEQ ID NO: 11100 - DNA, 20 bp, Unknown
  Description of Unknown: gRNA target site sequence
tgctagaaaaaaaacaaaaa

SEQ ID NO: 11101 - DNA, 20 bp, Unknown
  Description of Unknown: gRNA target site sequence
aaaaacaaaaaaggcatgta

SEQ ID NO: 11102 - DNA, 20 bp, Unknown
  Description of Unknown: gRNA target site sequence
aaacaaaaaaggcatgtata

SEQ ID NO: 11103 - DNA, 20 bp, Unknown
  Description of Unknown: gRNA target site sequence
aacaaaaaaggcatgtatag

SEQ ID NO: 11104 - DNA, 20 bp, Unknown
  Description of Unknown: gRNA target site sequence
ggcatgtatagaggaattat

SEQ ID NO: 11105 - DNA, 20 bp, Unknown
  Description of Unknown: gRNA target site sequence
gcatgtatagaggaattatg

SEQ ID NO: 11106 - DNA, 20 bp, Unknown
  Description of Unknown: gRNA target site sequence
catgtatagaggaattatga

SEQ ID NO: 11107 - DNA, 20 bp, Unknown
  Description of Unknown: gRNA target site sequence
tatagaggaattatgaggga

SEQ ID NO: 11108 - DNA, 20 bp, Unknown
  Description of Unknown: gRNA target site sequence
aattatgagggaaagatacc

SEQ ID NO: 11109 - DNA, 20 bp, Unknown
  Description of Unknown: gRNA target site sequence
gagggaaagataccaagtca

SEQ ID NO: 11110 - DNA, 20 bp, Unknown
  Description of Unknown: gRNA target site sequence
tcacggtttattcttcaaaa

SEQ ID NO: 11111 - DNA, 20 bp, Unknown
  Description of Unknown: gRNA target site sequence
acggtttattcttcaaaatg

SEQ ID NO: 11112 - DNA, 20 bp, Unknown
  Description of Unknown: gRNA target site sequence
cggtttattcttcaaaatgg

SEQ ID NO: 11113 - DNA, 20 bp, Unknown
  Description of Unknown: gRNA target site sequence
tttattcttcaaaatggagg

SEQ ID NO: 11114 - DNA, 20 bp, Unknown
  Description of Unknown: gRNA target site sequence
tcaaaatggaggtggcttgt

SEQ ID NO: 11115 - DNA, 20 bp, Unknown
  Description of Unknown: gRNA target site sequence
caaaatggaggtggcttgtt

SEQ ID NO: 11116 - DNA, 20 bp, Unknown
  Description of Unknown: gRNA target site sequence
aatggaggtggcttgttggg

SEQ ID NO: 11117 - DNA, 20 bp, Unknown
  Description of Unknown: gRNA target site sequence
atggaggtggcttgttggga

SEQ ID NO: 11118 - DNA, 20 bp, Unknown
  Description of Unknown: gRNA target site sequence
gaggtggcttgttgggaagg

SEQ ID NO: 11119 - DNA, 20 bp, Unknown
  Description of Unknown: gRNA target site sequence
gtggcttgttgggaaggtgg

SEQ ID NO: 11120 - DNA, 20 bp, Unknown
  Description of Unknown: gRNA target site sequence
tgggaaggtggaagctcatt

SEQ ID NO: 11121 - DNA, 20 bp, Unknown
  Description of Unknown: gRNA target site sequence
aaggtggaagctcatttggc

SEQ ID NO: 11122 - DNA, 20 bp, Unknown
  Description of Unknown: gRNA target site sequence
ggtggaagctcatttggcca

SEQ ID NO: 11123 - DNA, 20 bp, Unknown
  Description of Unknown: gRNA target site sequence
ggaagctcatttggccagag

SEQ ID NO: 11124 - DNA, 20 bp, Unknown
  Description of Unknown: gRNA target site sequence
tcatttggccagagtggaaa

SEQ ID NO: 11125 - DNA, 20 bp, Unknown
  Description of Unknown: gRNA target site sequence
ggccagagtggaaatggaat

SEQ ID NO: 11126 - DNA, 20 bp, Unknown
  Description of Unknown: gRNA target site sequence
gccagagtggaaatggaatt

SEQ ID NO: 11127 - DNA, 20 bp, Unknown
  Description of Unknown: gRNA target site sequence
cagagtggaaatggaattgg

SEQ ID NO: 11128 - DNA, 20 bp, Unknown
  Description of Unknown: gRNA target site sequence
gatgaccaaatgtaaacact

SEQ ID NO: 11129 - DNA, 20 bp, Unknown
  Description of Unknown: gRNA target site sequence
taaacacttggtgcctgata

SEQ ID NO: 11130 - DNA, 20 bp, Unknown
  Description of Unknown: gRNA target site sequence
gcctgatatagcttgacacc

SEQ ID NO: 11131 - DNA, 20 bp, Unknown
  Description of Unknown: gRNA target site sequence
gatatagcttgacaccaagt

SEQ ID NO: 11132 - DNA, 20 bp, Unknown
  Description of Unknown: gRNA target site sequence
cttgacaccaagttagcccc

SEQ ID NO: 11133 - DNA, 20 bp, Unknown
  Description of Unknown: gRNA target site sequence
tagccccaagtgaaataccc

SEQ ID NO: 11134 - DNA, 20 bp, Unknown
  Description of Unknown: gRNA target site sequence
tgtcttttcccgatattcct

SEQ ID NO: 11135 - DNA, 20 bp, Unknown
  Description of Unknown: gRNA target site sequence
gtcttttcccgatattcctc

SEQ ID NO: 11136 - DNA, 20 bp, Unknown
  Description of Unknown: gRNA target site sequence
gatattcctcaggtactcca

SEQ ID NO: 11137 - DNA, 20 bp, Unknown
  Description of Unknown: gRNA target site sequence
cctcaggtactccaaagatt

SEQ ID NO: 11138 - DNA, 20 bp, Unknown
  Description of Unknown: gRNA target site sequence
ctcaggtactccaaagattc

SEQ ID NO: 11139 - DNA, 20 bp, Unknown
  Description of Unknown: gRNA target site sequence
tcaggtttactcacgtcatc

SEQ ID NO: 11140 - DNA, 20 bp, Unknown
  Description of Unknown: gRNA target site sequence
ggtttactcacgtcatccag

SEQ ID NO: 11141 - DNA, 20 bp, Unknown
  Description of Unknown: gRNA target site sequence
tttactcacgtcatccagca

SEQ ID NO: 11142 - DNA, 20 bp, Unknown
  Description of Unknown: gRNA target site sequence
tcacgtcatccagcagagaa

SEQ ID NO: 11143 - DNA, 20 bp, Unknown
  Description of Unknown: gRNA target site sequence
gtcatccagcagagaatgga

SEQ ID NO: 11144 - DNA, 20 bp, Unknown
  Description of Unknown: gRNA target site sequence
ttcctgaattgctatgtgtc

SEQ ID NO: 11145 - DNA, 20 bp, Unknown
  Description of Unknown: gRNA target site sequence
tcctgaattgctatgtgtct

SEQ ID NO: 11146 - DNA, 20 bp, Unknown
  Description of Unknown: gRNA target site sequence
gtttcatccatccgacattg

SEQ ID NO: 11147 - DNA, 20 bp, Unknown
  Description of Unknown: gRNA target site sequence
acattgaagttgacttactg

SEQ ID NO: 11148 - DNA, 20 bp, Unknown
  Description of Unknown: gRNA target site sequence
gaagttgacttactgaagaa

SEQ ID NO: 11149 - DNA, 20 bp, Unknown
  Description of Unknown: gRNA target site sequence
agttgacttactgaagaatg

SEQ ID NO: 11150 - DNA, 20 bp, Unknown
  Description of Unknown: gRNA target site sequence
ttgacttactgaagaatgga

SEQ ID NO: 11151 - DNA, 20 bp, Unknown
  Description of Unknown: gRNA target site sequence
gacttactgaagaatggaga

SEQ ID NO: 11152 - DNA, 20 bp, Unknown
  Description of Unknown: gRNA target site sequence
gaatggagagagaattgaaa

SEQ ID NO: 11153 - DNA, 20 bp, Unknown
  Description of Unknown: gRNA target site sequence
tggagagagaattgaaaaag

SEQ ID NO: 11154 - DNA, 20 bp, Unknown
  Description of Unknown: gRNA target site sequence
gagagagaattgaaaaagtg

SEQ ID NO: 11155 - DNA, 20 bp, Unknown
  Description of Unknown: gRNA target site sequence
aattgaaaaagtggagcatt

SEQ ID NO: 11156 - DNA, 20 bp, Unknown
  Description of Unknown: gRNA target site sequence
gagcattcagacttgtcttt

SEQ ID NO: 11157 - DNA, 20 bp, Unknown
  Description of Unknown: gRNA target site sequence
attcagacttgtctttcagc

SEQ ID NO: 11158 - DNA, 20 bp, Unknown
  Description of Unknown: gRNA target site sequence
ttcagacttgtctttcagca

SEQ ID NO: 11159 - DNA, 20 bp, Unknown
  Description of Unknown: gRNA target site sequence
acttgtctttcagcaaggac

SEQ ID NO: 11160 - DNA, 20 bp, Unknown
  Description of Unknown: gRNA target site sequence
tgaattcacccccactgaaa

SEQ ID NO: 11161 - DNA, 20 bp, Unknown
  Description of Unknown: gRNA target site sequence
tcacccccactgaaaaagat

SEQ ID NO: 11162 - DNA, 20 bp, Unknown
  Description of Unknown: gRNA target site sequence
tgaaccatgtgactttgtca

SEQ ID NO: 11163 - DNA, 20 bp, Unknown
  Description of Unknown: gRNA target site sequence
atgtgactttgtcacagccc

SEQ ID NO: 11164 - DNA, 20 bp, Unknown
  Description of Unknown: gRNA target site sequence
gactttgtcacagcccaaga

SEQ ID NO: 11165 - DNA, 20 bp, Unknown
  Description of Unknown: gRNA target site sequence
tgtcacagcccaagatagtt

SEQ ID NO: 11166 - DNA, 20 bp, Unknown
  Description of Unknown: gRNA target site sequence
cacagcccaagatagttaag

SEQ ID NO: 11167 - DNA, 20 bp, Unknown
  Description of Unknown: gRNA target site sequence
acagcccaagatagttaagt

SEQ ID NO: 11168 - DNA, 20 bp, Unknown
  Description of Unknown: gRNA target site sequence
cagcccaagatagttaagtg

SEQ ID NO: 11169 - DNA, 20 bp, Unknown
  Description of Unknown: gRNA target site sequence
ccaagatagttaagtggggt

SEQ ID NO: 11170 - DNA, 20 bp, Unknown
  Description of Unknown: gRNA target site sequence
taagtcttacattcttttgt

SEQ ID NO: 11171 - DNA, 20 bp, Unknown
  Description of Unknown: gRNA target site sequence
attcttttgtaagctgctga

SEQ ID NO: 11172 - DNA, 20 bp, Unknown
  Description of Unknown: gRNA target site sequence
agctgctgaaagttgtgtat

SEQ ID NO: 11173 - DNA, 20 bp, Unknown
  Description of Unknown: gRNA target site sequence
tgctgaaagttgtgtatgag

SEQ ID NO: 11174 - DNA, 20 bp, Unknown
  Description of Unknown: gRNA target site sequence
gtatgagtagtcatatcata

SEQ ID NO: 11175 - DNA, 20 bp, Unknown
  Description of Unknown: gRNA target site sequence
aaagctgctttgatataaaa

SEQ ID NO: 11176 - DNA, 20 bp, Unknown
  Description of Unknown: gRNA target site sequence
aagctgctttgatataaaaa

SEQ ID NO: 11177 - DNA, 20 bp, Unknown
  Description of Unknown: gRNA target site sequence
tttgatataaaaaaggtcta

SEQ ID NO: 11178 - DNA, 20 bp, Unknown
  Description of Unknown: gRNA target site sequence
atggccatactaccctgaat

SEQ ID NO: 11179 - DNA, 20 bp, Unknown
  Description of Unknown: gRNA target site sequence
gatataaacaatctgcatat

SEQ ID NO: 11180 - DNA, 20 bp, Unknown
  Description of Unknown: gRNA target site sequence
atataaacaatctgcatatt

SEQ ID NO: 11181 - DNA, 20 bp, Unknown
  Description of Unknown: gRNA target site sequence
aatctgcatattgggattgt

SEQ ID NO: 11182 - DNA, 20 bp, Unknown
  Description of Unknown: gRNA target site sequence
atctgcatattgggattgtc

SEQ ID NO: 11183 - DNA, 20 bp, Unknown
  Description of Unknown: gRNA target site sequence
tctgcatattgggattgtca

SEQ ID NO: 11184 - DNA, 20 bp, Unknown
  Description of Unknown: gRNA target site sequence
attgtcagggaatgttctta

SEQ ID NO: 11185 - DNA, 20 bp, Unknown
  Description of Unknown: gRNA target site sequence
cagggaatgttcttaaagat

SEQ ID NO: 11186 - DNA, 20 bp, Unknown
  Description of Unknown: gRNA target site sequence
aatgttcttaaagatcagat

SEQ ID NO: 11187 - DNA, 20 bp, Unknown
  Description of Unknown: gRNA target site sequence
gttcttaaagatcagattag

SEQ ID NO: 11188 - DNA, 20 bp, Unknown
  Description of Unknown: gRNA target site sequence
tcagattagtggcacctgct

SEQ ID NO: 11189 - DNA, 20 bp, Unknown
  Description of Unknown: gRNA target site sequence
cctgctgagatactgatgca

SEQ ID NO: 11190 - DNA, 20 bp, Unknown
  Description of Unknown: gRNA target site sequence
tgagatactgatgcacagca

SEQ ID NO: 11191 - DNA, 20 bp, Unknown
  Description of Unknown: gRNA target site sequence
gcacagcatggtttctgaac

SEQ ID NO: 11192 - DNA, 20 bp, Unknown
  Description of Unknown: gRNA target site sequence
cagcatggtttctgaaccag

SEQ ID NO: 11193 - DNA, 20 bp, Unknown
  Description of Unknown: gRNA target site sequence
ctgaaccagtagtttccctg

SEQ ID NO: 11194 - DNA, 20 bp, Unknown
  Description of Unknown: gRNA target site sequence
ccagtagtttccctgcagtt

SEQ ID NO: 11195 - DNA, 20 bp, Unknown
  Description of Unknown: gRNA target site sequence
gtagtttccctgcagttgag

SEQ ID NO: 11196 - DNA, 20 bp, Unknown
  Description of Unknown: gRNA target site sequence
tagtttccctgcagttgagc

SEQ ID NO: 11197 - DNA, 20 bp, Unknown
  Description of Unknown: gRNA target site sequence
agtttccctgcagttgagca

SEQ ID NO: 11198 - DNA, 20 bp, Unknown
  Description of Unknown: gRNA target site sequence
tttccctgcagttgagcagg

SEQ ID NO: 11199 - DNA, 20 bp, Unknown
  Description of Unknown: gRNA target site sequence
ccctgcagttgagcagggag

SEQ ID NO: 11200 - DNA, 20 bp, Unknown
  Description of Unknown: gRNA target site sequence
tgcagttgagcagggagcag

SEQ ID NO: 11201 - DNA, 20 bp, Unknown
  Description of Unknown: gRNA target site sequence
agttgagcagggagcagcag

SEQ ID NO: 11202 - DNA, 20 bp, Unknown
  Description of Unknown: gRNA target site sequence
tcttaacacttcttacctac

SEQ ID NO: 11203 - DNA, 20 bp, Unknown
  Description of Unknown: gRNA target site sequence
tcttacctactggcttcctc

SEQ ID NO: 11204 - DNA, 20 bp, Unknown
  Description of Unknown: gRNA target site sequence
ctggcttcctctagcttttg

SEQ ID NO: 11205 - DNA, 20 bp, Unknown
  Description of Unknown: gRNA target site sequence
gcttcctctagcttttgtgg

SEQ ID NO: 11206 - DNA, 20 bp, Unknown
  Description of Unknown: gRNA target site sequence
tctagcttttgtggcagctt

SEQ ID NO: 11207 - DNA, 20 bp, Unknown
  Description of Unknown: gRNA target site sequence
ctagcttttgtggcagcttc

SEQ ID NO: 11208 - DNA, 20 bp, Unknown
  Description of Unknown: gRNA target site sequence
gtggcagcttcaggtatatt

SEQ ID NO: 11209 - DNA, 20 bp, Unknown
  Description of Unknown: gRNA target site sequence
tagcactgaacgaacatctc

SEQ ID NO: 11210 - DNA, 20 bp, Unknown
  Description of Unknown: gRNA target site sequence
cactgaacgaacatctcaag

SEQ ID NO: 11211 - DNA, 20 bp, Unknown
  Description of Unknown: gRNA target site sequence
actgaacgaacatctcaaga

SEQ ID NO: 11212 - DNA, 20 bp, Unknown
  Description of Unknown: gRNA target site sequence
acgaacatctcaagaaggta

SEQ ID NO: 11213 - DNA, 20 bp, Unknown
  Description of Unknown: gRNA target site sequence
cgaacatctcaagaaggtat

SEQ ID NO: 11214 - DNA, 20 bp, Unknown
  Description of Unknown: gRNA target site sequence
aggtataggcctttgtttgt

SEQ ID NO: 11215 - DNA, 20 bp, Unknown
  Description of Unknown: gRNA target site sequence
gtttgtaagtcctgctgtcc

SEQ ID NO: 11216 - DNA, 20 bp, Unknown
  Description of Unknown: gRNA target site sequence
gtcctagcatcctataatcc

SEQ ID NO: 11217 - DNA, 20 bp, Unknown
  Description of Unknown: gRNA target site sequence
cctataatcctggacttctc

SEQ ID NO: 11218 - DNA, 20 bp, Unknown
  Description of Unknown: gRNA target site sequence
tggacttctccagtactttc

SEQ ID NO: 11219 - DNA, 20 bp, Unknown
  Description of Unknown: gRNA target site sequence
cttctccagtactttctggc

SEQ ID NO: 11220 - DNA, 20 bp, Unknown
  Description of Unknown: gRNA target site sequence
ccagtactttctggctggat

SEQ ID NO: 11221 - DNA, 20 bp, Unknown
  Description of Unknown: gRNA target site sequence
ttctggctggattggtatct

SEQ ID NO: 11222 - DNA, 20 bp, Unknown
  Description of Unknown: gRNA target site sequence
tctggctggattggtatctg

SEQ ID NO: 11223 - DNA, 20 bp, Unknown
  Description of Unknown: gRNA target site sequence
gctggattggtatctgaggc

SEQ ID NO: 11224 - DNA, 20 bp, Unknown
  Description of Unknown: gRNA target site sequence
ggattggtatctgaggctag

SEQ ID NO: 11225 - DNA, 20 bp, Unknown
  Description of Unknown: gRNA target site sequence
gattggtatctgaggctagt

SEQ ID NO: 11226 - DNA, 20 bp, Unknown
  Description of Unknown: gRNA target site sequence
tggtatctgaggctagtagg

SEQ ID NO: 11227 - DNA, 20 bp, Unknown
  Description of Unknown: gRNA target site sequence
ggtatctgaggctagtagga

SEQ ID NO: 11228 - DNA, 20 bp, Unknown
  Description of Unknown: gRNA target site sequence
gtatctgaggctagtaggaa

SEQ ID NO: 11229 - DNA, 20 bp, Unknown
  Description of Unknown: gRNA target site sequence
taggaagggcttgttcctgc

SEQ ID NO: 11230 - DNA, 20 bp, Unknown
  Description of Unknown: gRNA target site sequence
aggaagggcttgttcctgct

SEQ ID NO: 11231 - DNA, 20 bp, Unknown
  Description of Unknown: gRNA target site sequence
aagggcttgttcctgctggg

SEQ ID NO: 11232 - DNA, 20 bp, Unknown
  Description of Unknown: gRNA target site sequence
agctctaaacaatgtattca

SEQ ID NO: 11233 - DNA, 20 bp, Unknown
  Description of Unknown: gRNA target site sequence
gctctaaacaatgtattcat

SEQ ID NO: 11234 - DNA, 20 bp, Unknown
  Description of Unknown: gRNA target site sequence
ctaaacaatgtattcatggg

SEQ ID NO: 11235 - DNA, 20 bp, Unknown
  Description of Unknown: gRNA target site sequence
taaacaatgtattcatgggt

SEQ ID NO: 11236 - DNA, 20 bp, Unknown
  Description of Unknown: gRNA target site sequence
aatgtattcatgggtaggaa

SEQ ID NO: 11237 - DNA, 20 bp, Unknown
  Description of Unknown: gRNA target site sequence
gtattcatgggtaggaacag

SEQ ID NO: 11238 - DNA, 20 bp, Unknown
  Description of Unknown: gRNA target site sequence
ggaacagcagcctattctgc

SEQ ID NO: 11239 - DNA, 20 bp, Unknown
  Description of Unknown: gRNA target site sequence
agccttatttctaaccattt

SEQ ID NO: 11240 - DNA, 20 bp, Unknown
  Description of Unknown: gRNA target site sequence
taaccattttagacatttgt

SEQ ID NO: 11241 - DNA, 20 bp, Unknown
  Description of Unknown: gRNA target site sequence
tttagacatttgttagtaca

SEQ ID NO: 11242 - DNA, 20 bp, Unknown
  Description of Unknown: gRNA target site sequence
gttagtacatggtattttaa

SEQ ID NO: 11243 - DNA, 20 bp, Unknown
  Description of Unknown: gRNA target site sequence
tttctccactgtctttttca

SEQ ID NO: 11244 - DNA, 20 bp, Unknown
  Description of Unknown: gRNA target site sequence
cactgtctttttcatagatc

SEQ ID NO: 11245 - DNA, 20 bp, Unknown
  Description of Unknown: gRNA target site sequence
tttcatagatcgagacatgt

SEQ ID NO: 11246 - DNA, 20 bp, Unknown
  Description of Unknown: gRNA target site sequence
catagatcgagacatgtaag

SEQ ID NO: 11247 - DNA, 20 bp, Unknown
  Description of Unknown: gRNA target site sequence
gagacatgtaagcagcatca

SEQ ID NO: 11248 - DNA, 20 bp, Unknown
  Description of Unknown: gRNA target site sequence
gacatgtaagcagcatcatg

SEQ ID NO: 11249 - DNA, 20 bp, Unknown
  Description of Unknown: gRNA target site sequence
acatgtaagcagcatcatgg

SEQ ID NO: 11250 - DNA, 20 bp, Unknown
  Description of Unknown: gRNA target site sequence
gtaagcagcatcatggaggt

SEQ ID NO: 11251 - DNA, 20 bp, Unknown
  Description of Unknown: gRNA target site sequence
ggaggtaagtttttgacctt

SEQ ID NO: 11252 - DNA, 20 bp, Unknown
  Description of Unknown: gRNA target site sequence
tgtttttgtttcactgtcct

SEQ ID NO: 11253 - DNA, 20 bp, Unknown
  Description of Unknown: gRNA target site sequence
gtttttgtttcactgtcctg

SEQ ID NO: 11254 - DNA, 20 bp, Unknown
  Description of Unknown: gRNA target site sequence
actgtcctgaggactattta

SEQ ID NO: 11255 - DNA, 20 bp, Unknown
  Description of Unknown: gRNA target site sequence
tcctgaggactatttataga

SEQ ID NO: 11256 - DNA, 20 bp, Unknown
  Description of Unknown: gRNA target site sequence
acatgataaccctcactatg

SEQ ID NO: 11257 - DNA, 20 bp, Unknown
  Description of Unknown: gRNA target site sequence
atgataaccctcactatgtg

SEQ ID NO: 11258 - DNA, 20 bp, Unknown
  Description of Unknown: gRNA target site sequence
cactatgtggagaacattga

SEQ ID NO: 11259 - DNA, 20 bp, Unknown
  Description of Unknown: gRNA target site sequence
ctatgtggagaacattgaca

SEQ ID NO: 11260 - DNA, 20 bp, Unknown
  Description of Unknown: gRNA target site sequence
acattgacagagtaacattt

SEQ ID NO: 11261 - DNA, 20 bp, Unknown
  Description of Unknown: gRNA target site sequence
ttgacagagtaacattttag

SEQ ID NO: 11262 - DNA, 20 bp, Unknown
  Description of Unknown: gRNA target site sequence
tgacagagtaacattttagc

SEQ ID NO: 11263 - DNA, 20 bp, Unknown
  Description of Unknown: gRNA target site sequence
gacagagtaacattttagca

SEQ ID NO: 11264 - DNA, 20 bp, Unknown
  Description of Unknown: gRNA target site sequence
gagtaacattttagcaggga

SEQ ID NO: 11265 - DNA, 20 bp, Unknown
  Description of Unknown: gRNA target site sequence
taacattttagcagggaaag

SEQ ID NO: 11266 - DNA, 20 bp, Unknown
  Description of Unknown: gRNA target site sequence
gcagggaaagaagaatccta

SEQ ID NO: 11267 - DNA, 20 bp, Unknown
  Description of Unknown: gRNA target site sequence
cagggaaagaagaatcctac

SEQ ID NO: 11268 - DNA, 20 bp, Unknown
  Description of Unknown: gRNA target site sequence
agggaaagaagaatcctaca

SEQ ID NO: 11269 - DNA, 20 bp, Unknown
  Description of Unknown: gRNA target site sequence
ggtcatgttcccttctcctg

SEQ ID NO: 11270 - DNA, 20 bp, Unknown
  Description of Unknown: gRNA target site sequence
tcatgttcccttctcctgtg

SEQ ID NO: 11271 - DNA, 20 bp, Unknown
  Description of Unknown: gRNA target site sequence
tgttcccttctcctgtggag

SEQ ID NO: 11272 - DNA, 20 bp, Unknown
  Description of Unknown: gRNA target site sequence
ttctcctgtggagtggcatg

SEQ ID NO: 11273 - DNA, 20 bp, Unknown
  Description of Unknown: gRNA target site sequence
tcctgtggagtggcatgaag

SEQ ID NO: 11274 - DNA, 20 bp, Unknown
  Description of Unknown: gRNA target site sequence
cctgtggagtggcatgaaga

SEQ ID NO: 11275 - DNA, 20 bp, Unknown
  Description of Unknown: gRNA target site sequence
agtggcatgaagaaggtgta

SEQ ID NO: 11276 - DNA, 20 bp, Unknown
  Description of Unknown: gRNA target site sequence
atgaagaaggtgtatggccc

SEQ ID NO: 11277 - DNA, 20 bp, Unknown
  Description of Unknown: gRNA target site sequence
tgaagaaggtgtatggcccc

SEQ ID NO: 11278 - DNA, 20 bp, Unknown
  Description of Unknown: gRNA target site sequence
aaggtgtatggccccaggta

SEQ ID NO: 11279 - DNA, 20 bp, Unknown
  Description of Unknown: gRNA target site sequence
gccatattactgaccctcta

SEQ ID NO: 11280 - DNA, 20 bp, Unknown
  Description of Unknown: gRNA target site sequence
catattactgaccctctaca

SEQ ID NO: 11281 - DNA, 20 bp, Unknown
  Description of Unknown: gRNA target site sequence
tattactgaccctctacaga

SEQ ID NO: 11282 - DNA, 20 bp, Unknown
  Description of Unknown: gRNA target site sequence
attactgaccctctacagag

SEQ ID NO: 11283 - DNA, 20 bp, Unknown
  Description of Unknown: gRNA target site sequence
ttactgaccctctacagaga

SEQ ID NO: 11284 - DNA, 20 bp, Unknown
  Description of Unknown: gRNA target site sequence
gaccctctacagagagggca

SEQ ID NO: 11285 - DNA, 20 bp, Unknown
  Description of Unknown: gRNA target site sequence
accctctacagagagggcaa

SEQ ID NO: 11286 - DNA, 20 bp, Unknown
  Description of Unknown: gRNA target site sequence
agagagggcaaaggaactgc

SEQ ID NO: 11287 - DNA, 20 bp, Unknown
  Description of Unknown: gRNA target site sequence
gggcaaaggaactgccagta

SEQ ID NO: 11288 - DNA, 20 bp, Unknown
  Description of Unknown: gRNA target site sequence
gaactgccagtatggtattg

SEQ ID NO: 11289 - DNA, 20 bp, Unknown
  Description of Unknown: gRNA target site sequence
aactgccagtatggtattgc

SEQ ID NO: 11290 - DNA, 20 bp, Unknown
  Description of Unknown: gRNA target site sequence
cagtatggtattgcaggata

SEQ ID NO: 11291 - DNA, 20 bp, Unknown
  Description of Unknown: gRNA target site sequence
agtatggtattgcaggataa

SEQ ID NO: 11292 - DNA, 20 bp, Unknown
  Description of Unknown: gRNA target site sequence
atggtattgcaggataaagg

SEQ ID NO: 11293 - DNA, 20 bp, Unknown
  Description of Unknown: gRNA target site sequence
tggtattgcaggataaaggc

SEQ ID NO: 11294 - DNA, 20 bp, Unknown
  Description of Unknown: gRNA target site sequence
tattgcaggataaaggcagg

SEQ ID NO: 11295 - DNA, 20 bp, Unknown
  Description of Unknown: gRNA target site sequence
tggttacccacattacctgc

SEQ ID NO: 11296 - DNA, 20 bp, Unknown
  Description of Unknown: gRNA target site sequence
ggttacccacattacctgca

SEQ ID NO: 11297 - DNA, 20 bp, Unknown
  Description of Unknown: gRNA target site sequence
ttcttctgccatttccacat

SEQ ID NO: 11298 - DNA, 20 bp, Unknown
  Description of Unknown: gRNA target site sequence
ccacattggacatctctgct

SEQ ID NO: 11299 - DNA, 20 bp, Unknown
  Description of Unknown: gRNA target site sequence
cacattggacatctctgctg

SEQ ID NO: 11300 - DNA, 20 bp, Unknown
  Description of Unknown: gRNA target site sequence
cattggacatctctgctgag

SEQ ID NO: 11301 - DNA, 20 bp, Unknown
  Description of Unknown: gRNA target site sequence
ttggacatctctgctgagga

SEQ ID NO: 11302 - DNA, 20 bp, Unknown
  Description of Unknown: gRNA target site sequence
tataatgttgttttattctt

SEQ ID NO: 11303 - DNA, 20 bp, Unknown
  Description of Unknown: gRNA target site sequence
atgttgttttattcttcaga

SEQ ID NO: 11304 - DNA, 20 bp, Unknown
  Description of Unknown: gRNA target site sequence
ttgttttattcttcagacag

SEQ ID NO: 11305 - DNA, 20 bp, Unknown
  Description of Unknown: gRNA target site sequence
gttttattcttcagacagaa

SEQ ID NO: 11306 - DNA, 20 bp, Unknown
  Description of Unknown: gRNA target site sequence
tttattcttcagacagaaga

SEQ ID NO: 11307 - DNA, 20 bp, Unknown
  Description of Unknown: gRNA target site sequence
ttattcttcagacagaagag

SEQ ID NO: 11308 - DNA, 20 bp, Unknown
  Description of Unknown: gRNA target site sequence
attcttcagacagaagagag

SEQ ID NO: 11309 - DNA, 20 bp, Unknown
  Description of Unknown: gRNA target site sequence
gacagaagagaggagttata

SEQ ID NO: 11310 - DNA, 20 bp, Unknown
  Description of Unknown: gRNA target site sequence
agaggagttatacagctctg

SEQ ID NO: 11311 - DNA, 20 bp, Unknown
  Description of Unknown: gRNA target site sequence
gcagacatcccattcctgta

SEQ ID NO: 11312 - DNA, 20 bp, Unknown
  Description of Unknown: gRNA target site sequence
cagacatcccattcctgtat

SEQ ID NO: 11313 - DNA, 20 bp, Unknown
  Description of Unknown: gRNA target site sequence
agacatcccattcctgtatg

SEQ ID NO: 11314 - DNA, 20 bp, Unknown
  Description of Unknown: gRNA target site sequence
tggggactgtgtttgcctct

SEQ ID NO: 11315 - DNA, 20 bp, Unknown
  Description of Unknown: gRNA target site sequence
gggactgtgtttgcctctta

SEQ ID NO: 11316 - DNA, 20 bp, Unknown
  Description of Unknown: gRNA target site sequence
ggactgtgtttgcctcttag

SEQ ID NO: 11317 - DNA, 20 bp, Unknown
  Description of Unknown: gRNA target site sequence
gtttgcctcttagaggttcc

SEQ ID NO: 11318 - DNA, 20 bp, Unknown
  Description of Unknown: gRNA target site sequence
tttgcctcttagaggttccc

SEQ ID NO: 11319 - DNA, 20 bp, Unknown
  Description of Unknown: gRNA target site sequence
cttagaggttcccaggccac

SEQ ID NO: 11320 - DNA, 20 bp, Unknown
  Description of Unknown: gRNA target site sequence
tagaggttcccaggccacta

SEQ ID NO: 11321 - DNA, 20 bp, Unknown
  Description of Unknown: gRNA target site sequence
agaggttcccaggccactag

SEQ ID NO: 11322 - DNA, 20 bp, Unknown
  Description of Unknown: gRNA target site sequence
aggttcccaggccactagag

SEQ ID NO: 11323 - DNA, 20 bp, Unknown
  Description of Unknown: gRNA target site sequence
ccaggccactagaggagata

SEQ ID NO: 11324 - DNA, 20 bp, Unknown
  Description of Unknown: gRNA target site sequence
caggccactagaggagataa

SEQ ID NO: 11325 - DNA, 20 bp, Unknown
  Description of Unknown: gRNA target site sequence
aggccactagaggagataaa

SEQ ID NO: 11326 - DNA, 20 bp, Unknown
  Description of Unknown: gRNA target site sequence
ctagaggagataaagggaaa

SEQ ID NO: 11327 - DNA, 20 bp, Unknown
  Description of Unknown: gRNA target site sequence
ttgatataatgatactataa

SEQ ID NO: 11328 - DNA, 20 bp, Unknown
  Description of Unknown: gRNA target site sequence
actataatagatgtaactac

SEQ ID NO: 11329 - DNA, 20 bp, Unknown
  Description of Unknown: gRNA target site sequence
ctataatagatgtaactaca

SEQ ID NO: 11330 - DNA, 20 bp, Unknown
  Description of Unknown: gRNA target site sequence
ataatagatgtaactacaag

SEQ ID NO: 11331 - DNA, 20 bp, Unknown
  Description of Unknown: gRNA target site sequence
gatgtaactacaaggagctc

SEQ ID NO: 11332 - DNA, 20 bp, Unknown
  Description of Unknown: gRNA target site sequence
gtaactacaaggagctccag

SEQ ID NO: 11333 - DNA, 20 bp, Unknown
  Description of Unknown: gRNA target site sequence
ctacaaggagctccagaagc

SEQ ID NO: 11334 - DNA, 20 bp, Unknown
  Description of Unknown: gRNA target site sequence
acaaggagctccagaagcaa

SEQ ID NO: 11335 - DNA, 20 bp, Unknown
  Description of Unknown: gRNA target site sequence
aaggagctccagaagcaaga

SEQ ID NO: 11336 - DNA, 20 bp, Unknown
  Description of Unknown: gRNA target site sequence
ggagctccagaagcaagaga

SEQ ID NO: 11337 - DNA, 20 bp, Unknown
  Description of Unknown: gRNA target site sequence
gagctccagaagcaagagag

SEQ ID NO: 11338 - DNA, 20 bp, Unknown
  Description of Unknown: gRNA target site sequence
agctccagaagcaagagaga

SEQ ID NO: 11339 - DNA, 20 bp, Unknown
  Description of Unknown: gRNA target site sequence
ctccagaagcaagagagagg

SEQ ID NO: 11340 - DNA, 20 bp, Unknown
  Description of Unknown: gRNA target site sequence
tccagaagcaagagagaggg

SEQ ID NO: 11341 - DNA, 20 bp, Unknown
  Description of Unknown: gRNA target site sequence
gcaagagagagggaggaact

SEQ ID NO: 11342 - DNA, 20 bp, Unknown
  Description of Unknown: gRNA target site sequence
cttggacttctctgcatctt

SEQ ID NO: 11343 - DNA, 20 bp, Unknown
  Description of Unknown: gRNA target site sequence
gacttctctgcatctttagt

SEQ ID NO: 11344 - DNA, 20 bp, Unknown
  Description of Unknown: gRNA target site sequence
cttctctgcatctttagttg

SEQ ID NO: 11345 - DNA, 20 bp, Unknown
  Description of Unknown: gRNA target site sequence
gcatctttagttggagtcca

SEQ ID NO: 11346 - DNA, 20 bp, Unknown
  Description of Unknown: gRNA target site sequence
catctttagttggagtccaa

SEQ ID NO: 11347 - DNA, 20 bp, Unknown
  Description of Unknown: gRNA target site sequence
ttcaatgaaattctactgcc

SEQ ID NO: 11348 - DNA, 20 bp, Unknown
  Description of Unknown: gRNA target site sequence
tcaatgaaattctactgccc

SEQ ID NO: 11349 - DNA, 20 bp, Unknown
  Description of Unknown: gRNA target site sequence
caatgaaattctactgccca

SEQ ID NO: 11350 - DNA, 20 bp, Unknown
  Description of Unknown: gRNA target site sequence
tcaaatctcctgttatattc

SEQ ID NO: 11351 - DNA, 20 bp, Unknown
  Description of Unknown: gRNA target site sequence
tctcctgttatattctagaa

SEQ ID NO: 11352 - DNA, 20 bp, Unknown
  Description of Unknown: gRNA target site sequence
ctcctgttatattctagaac

SEQ ID NO: 11353 - DNA, 20 bp, Unknown
  Description of Unknown: gRNA target site sequence
tcctgttatattctagaaca

SEQ ID NO: 11354 - DNA, 20 bp, Unknown
  Description of Unknown: gRNA target site sequence
tctagaacagggaattgatt

SEQ ID NO: 11355 - DNA, 20 bp, Unknown
  Description of Unknown: gRNA target site sequence
ctagaacagggaattgattt

SEQ ID NO: 11356 - DNA, 20 bp, Unknown
  Description of Unknown: gRNA target site sequence
agaacagggaattgatttgg

SEQ ID NO: 11357 - DNA, 20 bp, Unknown
  Description of Unknown: gRNA target site sequence
aacagggaattgatttggga

SEQ ID NO: 11358 - DNA, 20 bp, Unknown
  Description of Unknown: gRNA target site sequence
gaattgatttgggagagcat

SEQ ID NO: 11359 - DNA, 20 bp, Unknown
  Description of Unknown: gRNA target site sequence
aattgatttgggagagcatc

SEQ ID NO: 11360 - DNA, 20 bp, Unknown
  Description of Unknown: gRNA target site sequence
tgatttgggagagcatcagg

SEQ ID NO: 11361 - DNA, 20 bp, Unknown
  Description of Unknown: gRNA target site sequence
gatttgggagagcatcagga

SEQ ID NO: 11362 - DNA, 20 bp, Unknown
  Description of Unknown: gRNA target site sequence
ttgggagagcatcaggaagg

SEQ ID NO: 11363 - DNA, 20 bp, Unknown
  Description of Unknown: gRNA target site sequence
aggaaggtggatgatctgcc

SEQ ID NO: 11364 - DNA, 20 bp, Unknown
  Description of Unknown: gRNA target site sequence
gatctgcccagtcacactgt

SEQ ID NO: 11365 - DNA, 20 bp, Unknown
  Description of Unknown: gRNA target site sequence
gtcacactgttagtaaattg

SEQ ID NO: 11366 - DNA, 20 bp, Unknown
  Description of Unknown: gRNA target site sequence
cacactgttagtaaattgta

SEQ ID NO: 11367 - DNA, 20 bp, Unknown
  Description of Unknown: gRNA target site sequence
ctgttagtaaattgtagagc

SEQ ID NO: 11368 - DNA, 20 bp, Unknown
  Description of Unknown: gRNA target site sequence
tgttagtaaattgtagagcc

SEQ ID NO: 11369 - DNA, 20 bp, Unknown
  Description of Unknown: gRNA target site sequence
ccaggacctgaactctaata

SEQ ID NO: 11370 - DNA, 20 bp, Unknown
  Description of Unknown: gRNA target site sequence
agtcatgtgttacttaatga

SEQ ID NO: 11371 - DNA, 20 bp, Unknown
  Description of Unknown: gRNA target site sequence
gtcatgtgttacttaatgac

SEQ ID NO: 11372 - DNA, 20 bp, Unknown
  Description of Unknown: gRNA target site sequence
tcatgtgttacttaatgacg

SEQ ID NO: 11373 - DNA, 20 bp, Unknown
  Description of Unknown: gRNA target site sequence
taatgacggggacatgttct

SEQ ID NO: 11374 - DNA, 20 bp, Unknown
  Description of Unknown: gRNA target site sequence
gagaaatgcttacacaaacc

SEQ ID NO: 11375 - DNA, 20 bp, Unknown
  Description of Unknown: gRNA target site sequence
agaaatgcttacacaaacct

SEQ ID NO: 11376 - DNA, 20 bp, Unknown
  Description of Unknown: gRNA target site sequence
ttacacaaacctaggtgttg

SEQ ID NO: 11377 - DNA, 20 bp, Unknown
  Description of Unknown: gRNA target site sequence
gttgtagcctactacacgca

SEQ ID NO: 11378 - DNA, 20 bp, Unknown
  Description of Unknown: gRNA target site sequence
ttgtagcctactacacgcat

SEQ ID NO: 11379 - DNA, 20 bp, Unknown
  Description of Unknown: gRNA target site sequence
tactacacgcataggctaca

SEQ ID NO: 11380 - DNA, 20 bp, Unknown
  Description of Unknown: gRNA target site sequence
cacgcataggctacatggta

SEQ ID NO: 11381 - DNA, 20 bp, Unknown
  Description of Unknown: gRNA target site sequence
atggtatagcctattgctcc

SEQ ID NO: 11382 - DNA, 20 bp, Unknown
  Description of Unknown: gRNA target site sequence
tcctagactacaaacctgta

SEQ ID NO: 11383 - DNA, 20 bp, Unknown
  Description of Unknown: gRNA target site sequence
tgttactgtactgaatactg

SEQ ID NO: 11384 - DNA, 20 bp, Unknown
  Description of Unknown: gRNA target site sequence
gttactgtactgaatactgt

SEQ ID NO: 11385 - DNA, 20 bp, Unknown
  Description of Unknown: gRNA target site sequence
actgtactgaatactgtggg

SEQ ID NO: 11386 - DNA, 20 bp, Unknown
  Description of Unknown: gRNA target site sequence
tgtgggcagttgtaacacaa

SEQ ID NO: 11387 - DNA, 20 bp, Unknown
  Description of Unknown: gRNA target site sequence
ggcagttgtaacacaatggt

SEQ ID NO: 11388 - DNA, 20 bp, Unknown
  Description of Unknown: gRNA target site sequence
agtatttgtgtatctaaaca

SEQ ID NO: 11389 - DNA, 20 bp, Unknown
  Description of Unknown: gRNA target site sequence
atttgtgtatctaaacatag

SEQ ID NO: 11390 - DNA, 20 bp, Unknown
  Description of Unknown: gRNA target site sequence
gtatctaaacatagaagttg

SEQ ID NO: 11391 - DNA, 20 bp, Unknown
  Description of Unknown: gRNA target site sequence
atatgctattttaatcttat

SEQ ID NO: 11392 - DNA, 20 bp, Unknown
  Description of Unknown: gRNA target site sequence
tgagaccactgtcatatata

SEQ ID NO: 11393 - DNA, 20 bp, Unknown
  Description of Unknown: gRNA target site sequence
cattgaccaaaacatcatat

SEQ ID NO: 11394 - DNA, 20 bp, Unknown
  Description of Unknown: gRNA target site sequence
atatcagcattttttcttct

SEQ ID NO: 11395 - DNA, 20 bp, Unknown
  Description of Unknown: gRNA target site sequence
cattttttcttctaagattt

SEQ ID NO: 11396 - DNA, 20 bp, Unknown
  Description of Unknown: gRNA target site sequence
attttttcttctaagatttt

SEQ ID NO: 11397 - DNA, 20 bp, Unknown
  Description of Unknown: gRNA target site sequence
tttttcttctaagattttgg

SEQ ID NO: 11398 - DNA, 20 bp, Unknown
  Description of Unknown: gRNA target site sequence
ctaagattttgggagcacca

SEQ ID NO: 11399 - DNA, 20 bp, Unknown
  Description of Unknown: gRNA target site sequence
taagattttgggagcaccaa

SEQ ID NO: 11400 - DNA, 20 bp, Unknown
  Description of Unknown: gRNA target site sequence
aagattttgggagcaccaaa

SEQ ID NO: 11401 - DNA, 20 bp, Unknown
  Description of Unknown: gRNA target site sequence
gcaccaaagggatacactaa

SEQ ID NO: 11402 - DNA, 20 bp, Unknown
  Description of Unknown: gRNA target site sequence
caccaaagggatacactaac

SEQ ID NO: 11403 - DNA, 20 bp, Unknown
  Description of Unknown: gRNA target site sequence
acaggatatactctttataa

SEQ ID NO: 11404 - DNA, 20 bp, Unknown
  Description of Unknown: gRNA target site sequence
caggatatactctttataat

SEQ ID NO: 11405 - DNA, 20 bp, Unknown
  Description of Unknown: gRNA target site sequence
tatactctttataatgggtt

SEQ ID NO: 11406 - DNA, 20 bp, Unknown
  Description of Unknown: gRNA target site sequence
tactctttataatgggtttg

SEQ ID NO: 11407 - DNA, 20 bp, Unknown
  Description of Unknown: gRNA target site sequence
tgggtttggagaactgtctg

SEQ ID NO: 11408 - DNA, 20 bp, Unknown
  Description of Unknown: gRNA target site sequence
ctgcagctacttcttttaaa

SEQ ID NO: 11409 - DNA, 20 bp, Unknown
  Description of Unknown: gRNA target site sequence
tgcagctacttcttttaaaa

SEQ ID NO: 11410 - DNA, 20 bp, Unknown
  Description of Unknown: gRNA target site sequence
ttttaaaaaggtgatctaca

SEQ ID NO: 11411 - DNA, 20 bp, Unknown
  Description of Unknown: gRNA target site sequence
taaaaaggtgatctacacag

SEQ ID NO: 11412 - DNA, 20 bp, Unknown
  Description of Unknown: gRNA target site sequence
gtgatctacacagtagaaat

SEQ ID NO: 11413 - DNA, 20 bp, Unknown
  Description of Unknown: gRNA target site sequence
ctacacagtagaaattagac

SEQ ID NO: 11414 - DNA, 20 bp, Unknown
  Description of Unknown: gRNA target site sequence
cagtagaaattagacaagtt

SEQ ID NO: 11415 - DNA, 20 bp, Unknown
  Description of Unknown: gRNA target site sequence
aattagacaagtttggtaat

SEQ ID NO: 11416 - DNA, 20 bp, Unknown
  Description of Unknown: gRNA target site sequence
taacctttttcttttctttt

SEQ ID NO: 11417 - DNA, 20 bp, Unknown
  Description of Unknown: gRNA target site sequence
aacctttttcttttcttttc

SEQ ID NO: 11418 - DNA, 20 bp, Unknown
  Description of Unknown: gRNA target site sequence
ttcttttcttttcaggtttg

SEQ ID NO: 11419 - DNA, 20 bp, Unknown
  Description of Unknown: gRNA target site sequence
aggtttgaagatgccgcatt

SEQ ID NO: 11420 - DNA, 20 bp, Unknown
  Description of Unknown: gRNA target site sequence
tgaagatgccgcatttggat

SEQ ID NO: 11421 - DNA, 20 bp, Unknown
  Description of Unknown: gRNA target site sequence
tacactttatgcacaaaatg

SEQ ID NO: 11422 - DNA, 20 bp, Unknown
  Description of Unknown: gRNA target site sequence
acactttatgcacaaaatgt

SEQ ID NO: 11423 - DNA, 20 bp, Unknown
  Description of Unknown: gRNA target site sequence
cactttatgcacaaaatgta

SEQ ID NO: 11424 - DNA, 20 bp, Unknown
  Description of Unknown: gRNA target site sequence
gggttataataatgttaaca

SEQ ID NO: 11425 - DNA, 20 bp, Unknown
  Description of Unknown: gRNA target site sequence
cttctttataattctacttt

SEQ ID NO: 11426 - DNA, 20 bp, Unknown
  Description of Unknown: gRNA target site sequence
tctccatgtttgatgtatct

SEQ ID NO: 11427 - DNA, 20 bp, Unknown
  Description of Unknown: gRNA target site sequence
ccatgtttgatgtatctgag

SEQ ID NO: 11428 - DNA, 20 bp, Unknown
  Description of Unknown: gRNA target site sequence
catgtttgatgtatctgagc

SEQ ID NO: 11429 - DNA, 20 bp, Unknown
  Description of Unknown: gRNA target site sequence
tatctgagcaggttgctcca

SEQ ID NO: 11430 - DNA, 20 bp, Unknown
  Description of Unknown: gRNA target site sequence
atctgagcaggttgctccac

SEQ ID NO: 11431 - DNA, 20 bp, Unknown
  Description of Unknown: gRNA target site sequence
tgagcaggttgctccacagg

SEQ ID NO: 11432 - DNA, 20 bp, Unknown
  Description of Unknown: gRNA target site sequence
ggttgctccacaggtagctc

SEQ ID NO: 11433 - DNA, 20 bp, Unknown
  Description of Unknown: gRNA target site sequence
gttgctccacaggtagctct

SEQ ID NO: 11434 - DNA, 20 bp, Unknown
  Description of Unknown: gRNA target site sequence
tgctccacaggtagctctag

SEQ ID NO: 11435 - DNA, 20 bp, Unknown
  Description of Unknown: gRNA target site sequence
gctccacaggtagctctagg

SEQ ID NO: 11436 - DNA, 20 bp, Unknown
  Description of Unknown: gRNA target site sequence
ctccacaggtagctctagga

SEQ ID NO: 11437 - DNA, 20 bp, Unknown
  Description of Unknown: gRNA target site sequence
acaggtagctctaggagggc

SEQ ID NO: 11438 - DNA, 20 bp, Unknown
  Description of Unknown: gRNA target site sequence
ctctaggagggctggcaact

SEQ ID NO: 11439 - DNA, 20 bp, Unknown
  Description of Unknown: gRNA target site sequence
ctaggagggctggcaactta

SEQ ID NO: 11440 - DNA, 20 bp, Unknown
  Description of Unknown: gRNA target site sequence
taggagggctggcaacttag

SEQ ID NO: 11441 - DNA, 20 bp, Unknown
  Description of Unknown: gRNA target site sequence
gagggctggcaacttagagg

SEQ ID NO: 11442 - DNA, 20 bp, Unknown
  Description of Unknown: gRNA target site sequence
agggctggcaacttagaggt

SEQ ID NO: 11443 - DNA, 20 bp, Unknown
  Description of Unknown: gRNA target site sequence
gggctggcaacttagaggtg

SEQ ID NO: 11444 - DNA, 20 bp, Unknown
  Description of Unknown: gRNA target site sequence
gctggcaacttagaggtggg

SEQ ID NO: 11445 - DNA, 20 bp, Unknown
  Description of Unknown: gRNA target site sequence
ggcaacttagaggtggggag

SEQ ID NO: 11446 - DNA, 20 bp, Unknown
  Description of Unknown: gRNA target site sequence
caacttagaggtggggagca

SEQ ID NO: 11447 - DNA, 20 bp, Unknown
  Description of Unknown: gRNA target site sequence
cttatccaacatcaacatct

SEQ ID NO: 11448 - DNA, 20 bp, Unknown
  Description of Unknown: gRNA target site sequence
tccaacatcaacatcttggt

SEQ ID NO: 11449 - DNA, 20 bp, Unknown
  Description of Unknown: gRNA target site sequence
tcttcaatctcttgcactca

SEQ ID NO: 11450 - DNA, 20 bp, Unknown
  Description of Unknown: gRNA target site sequence
tcttgcactcaaagcttgtt

SEQ ID NO: 11451 - DNA, 20 bp, Unknown
  Description of Unknown: gRNA target site sequence
gcactcaaagcttgttaaga

SEQ ID NO: 11452 - DNA, 20 bp, Unknown
  Description of Unknown: gRNA target site sequence
caaagcttgttaagatagtt

SEQ ID NO: 11453 - DNA, 20 bp, Unknown
  Description of Unknown: gRNA target site sequence
taagatagttaagcgtgcat

SEQ ID NO: 11454 - DNA, 20 bp, Unknown
  Description of Unknown: gRNA target site sequence
tccaatttacatactctgct

SEQ ID NO: 11455 - DNA, 20 bp, Unknown
  Description of Unknown: gRNA target site sequence
tacatactctgcttagaatt

SEQ ID NO: 11456 - DNA, 20 bp, Unknown
  Description of Unknown: gRNA target site sequence
acatactctgcttagaattt

SEQ ID NO: 11457 - DNA, 20 bp, Unknown
  Description of Unknown: gRNA target site sequence
catactctgcttagaatttg

SEQ ID NO: 11458 - DNA, 20 bp, Unknown
  Description of Unknown: gRNA target site sequence
atactctgcttagaatttgg

SEQ ID NO: 11459 - DNA, 20 bp, Unknown
  Description of Unknown: gRNA target site sequence
ttagaatttgggggaaaatt

SEQ ID NO: 11460 - DNA, 20 bp, Unknown
  Description of Unknown: gRNA target site sequence
aaatttagaaatataattga

SEQ ID NO: 11461 - DNA, 20 bp, Unknown
  Description of Unknown: gRNA target site sequence
aatttagaaatataattgac

SEQ ID NO: 11462 - DNA, 20 bp, Unknown
  Description of Unknown: gRNA target site sequence
aatataattgacaggattat

SEQ ID NO: 11463 - DNA, 20 bp, Unknown
  Description of Unknown: gRNA target site sequence
aatgaaacattttgtcatat

SEQ ID NO: 11464 - DNA, 20 bp, Unknown
  Description of Unknown: gRNA target site sequence
tacttcttatacatttgata

SEQ ID NO: 11465 - DNA, 20 bp, Unknown
  Description of Unknown: gRNA target site sequence
tcttatacatttgataaagt

SEQ ID NO: 11466 - DNA, 20 bp, Unknown
  Description of Unknown: gRNA target site sequence
cttatacatttgataaagta

SEQ ID NO: 11467 - DNA, 20 bp, Unknown
  Description of Unknown: gRNA target site sequence
acatttgataaagtaaggca

SEQ ID NO: 11468 - DNA, 20 bp, Unknown
  Description of Unknown: gRNA target site sequence
gataaagtaaggcatggttg

SEQ ID NO: 11469 - DNA, 20 bp, Unknown
  Description of Unknown: gRNA target site sequence
aggcatggttgtggttaatc

SEQ ID NO: 11470 - DNA, 20 bp, Unknown
  Description of Unknown: gRNA target site sequence
ctggtttatttttgttccac

SEQ ID NO: 11471 - DNA, 20 bp, Unknown
  Description of Unknown: gRNA target site sequence
attacccctttattttcaaa

SEQ ID NO: 11472 - DNA, 20 bp, Unknown
  Description of Unknown: gRNA target site sequence
ttacccctttattttcaaac

SEQ ID NO: 11473 - DNA, 20 bp, Unknown
  Description of Unknown: gRNA target site sequence
tacccctttattttcaaaca

SEQ ID NO: 11474 - DNA, 20 bp, Unknown
  Description of Unknown: gRNA target site sequence
tttattttcaaacagggaaa

SEQ ID NO: 11475 - DNA, 20 bp, Unknown
  Description of Unknown: gRNA target site sequence
tgtttccctgtttgaaaata

SEQ ID NO: 11476 - DNA, 20 bp, Unknown
  Description of Unknown: gRNA target site sequence
gtttccctgtttgaaaataa

SEQ ID NO: 11477 - DNA, 20 bp, Unknown
  Description of Unknown: gRNA target site sequence
tttccctgtttgaaaataaa

SEQ ID NO: 11478 - DNA, 20 bp, Unknown
  Description of Unknown: gRNA target site sequence
ttccctgtttgaaaataaag

SEQ ID NO: 11479 - DNA, 20 bp, Unknown
  Description of Unknown: gRNA target site sequence
gtttgaaaataaaggggtaa

SEQ ID NO: 11480 - DNA, 20 bp, Unknown
  Description of Unknown: gRNA target site sequence
tgaaaataaaggggtaatag

SEQ ID NO: 11481 - DNA, 20 bp, Unknown
  Description of Unknown: gRNA target site sequence
gaaaataaaggggtaatagt

SEQ ID NO: 11482 - DNA, 20 bp, Unknown
  Description of Unknown: gRNA target site sequence
aaataaaggggtaatagtgg

SEQ ID NO: 11483 - DNA, 20 bp, Unknown
  Description of Unknown: gRNA target site sequence
aaaggggtaatagtgggagt

SEQ ID NO: 11484 - DNA, 20 bp, Unknown
  Description of Unknown: gRNA target site sequence
taatagtgggagtgagatat

SEQ ID NO: 11485 - DNA, 20 bp, Unknown
  Description of Unknown: gRNA target site sequence
atagtgggagtgagatataa

SEQ ID NO: 11486 - DNA, 20 bp, Unknown
  Description of Unknown: gRNA target site sequence
gatataagagataacacatc

SEQ ID NO: 11487 - DNA, 20 bp, Unknown
  Description of Unknown: gRNA target site sequence
tttatgatttatttaacttg

SEQ ID NO: 11488 - DNA, 20 bp, Unknown
  Description of Unknown: gRNA target site sequence
cttgtggaacaaaaataaac

SEQ ID NO: 11489 - DNA, 20 bp, Unknown
  Description of Unknown: gRNA target site sequence
ccttactttatcaaatgtat

SEQ ID NO: 11490 - DNA, 20 bp, Unknown
  Description of Unknown: gRNA target site sequence
tactttatcaaatgtataag

SEQ ID NO: 11491 - DNA, 20 bp, Unknown
  Description of Unknown: gRNA target site sequence
taaattttcccccaaattct

SEQ ID NO: 11492 - DNA, 20 bp, Unknown
  Description of Unknown: gRNA target site sequence
attttcccccaaattctaag

SEQ ID NO: 11493 - DNA, 20 bp, Unknown
  Description of Unknown: gRNA target site sequence
tttcccccaaattctaagca

SEQ ID NO: 11494 - DNA, 20 bp, Unknown
  Description of Unknown: gRNA target site sequence
tctaagcagagtatgtaaat

SEQ ID NO: 11495 - DNA, 20 bp, Unknown
  Description of Unknown: gRNA target site sequence
aagcagagtatgtaaattgg

SEQ ID NO: 11496 - DNA, 20 bp, Unknown
  Description of Unknown: gRNA target site sequence
gcacgcttaactatcttaac

SEQ ID NO: 11497 - DNA, 20 bp, Unknown
  Description of Unknown: gRNA target site sequence
taactatcttaacaagcttt

SEQ ID NO: 11498 - DNA, 20 bp, Unknown
  Description of Unknown: gRNA target site sequence
tcttaacaagctttgagtgc

SEQ ID NO: 11499 - DNA, 20 bp, Unknown
  Description of Unknown: gRNA target site sequence
ttaacaagctttgagtgcaa

SEQ ID NO: 11500 - DNA, 20 bp, Unknown
  Description of Unknown: gRNA target site sequence
gctttgagtgcaagagattg

SEQ ID NO: 11501 - DNA, 20 bp, Unknown
  Description of Unknown: gRNA target site sequence
tttgagtgcaagagattgaa

SEQ ID NO: 11502 - DNA, 20 bp, Unknown
  Description of Unknown: gRNA target site sequence
tgaagagttcaaatctgacc

SEQ ID NO: 11503 - DNA, 20 bp, Unknown
  Description of Unknown: gRNA target site sequence
tctgaccaagatgttgatgt

SEQ ID NO: 11504 - DNA, 20 bp, Unknown
  Description of Unknown: gRNA target site sequence
ccaagatgttgatgttggat

SEQ ID NO: 11505 - DNA, 20 bp, Unknown
  Description of Unknown: gRNA target site sequence
aagatgttgatgttggataa

SEQ ID NO: 11506 - DNA, 20 bp, Unknown
  Description of Unknown: gRNA target site sequence
attctctgctccccacctct

SEQ ID NO: 11507 - DNA, 20 bp, Unknown
  Description of Unknown: gRNA target site sequence
gctccccacctctaagttgc

SEQ ID NO: 11508 - DNA, 20 bp, Unknown
  Description of Unknown: gRNA target site sequence
ctctaagttgccagccctcc

SEQ ID NO: 11509 - DNA, 20 bp, Unknown
  Description of Unknown: gRNA target site sequence
ctaagttgccagccctccta

SEQ ID NO: 11510 - DNA, 20 bp, Unknown
  Description of Unknown: gRNA target site sequence
agccctcctagagctacctg

SEQ ID NO: 11511 - DNA, 20 bp, Unknown
  Description of Unknown: gRNA target site sequence
ccctcctagagctacctgtg

SEQ ID NO: 11512 - DNA, 20 bp, Unknown
  Description of Unknown: gRNA target site sequence
tacctgtggagcaacctgct

SEQ ID NO: 11513 - DNA, 20 bp, Unknown
  Description of Unknown: gRNA target site sequence
ctgctcagatacatcaaaca

SEQ ID NO: 11514 - DNA, 20 bp, Unknown
  Description of Unknown: gRNA target site sequence
gctcagatacatcaaacatg

SEQ ID NO: 11515 - DNA, 20 bp, Unknown
  Description of Unknown: gRNA target site sequence
agatacatcaaacatggaga

SEQ ID NO: 11516 - DNA, 20 bp, Unknown
  Description of Unknown: gRNA target site sequence
aaacatggagacagcactca

SEQ ID NO: 11517 - DNA, 20 bp, Unknown
  Description of Unknown: gRNA target site sequence
catggagacagcactcaaag

SEQ ID NO: 11518 - DNA, 20 bp, Unknown
  Description of Unknown: gRNA target site sequence
gcactcaaagtagaattata

SEQ ID NO: 11519 - DNA, 20 bp, Unknown
  Description of Unknown: gRNA target site sequence
ctcaaagtagaattataaag

SEQ ID NO: 11520 - DNA, 20 bp, Unknown
  Description of Unknown: gRNA target site sequence
aaccctacattttgtgcata

SEQ ID NO: 11521 - DNA, 20 bp, Unknown
  Description of Unknown: gRNA target site sequence
acattttgtgcataaagtgt

SEQ ID NO: 11522 - DNA, 20 bp, Unknown
  Description of Unknown: gRNA target site sequence
tgcataaagtgtaagtgtat

SEQ ID NO: 11523 - DNA, 20 bp, Unknown
  Description of Unknown: gRNA target site sequence
ataagcatatcaatattaaa

SEQ ID NO: 11524 - DNA, 20 bp, Unknown
  Description of Unknown: gRNA target site sequence
gcatatcaatattaaaaagc

SEQ ID NO: 11525 - DNA, 20 bp, Unknown
  Description of Unknown: gRNA target site sequence
atcaatattaaaaagcaagc

SEQ ID NO: 11526 - DNA, 20 bp, Unknown
  Description of Unknown: gRNA target site sequence
aatattaaaaagcaagcaag

SEQ ID NO: 11527 - DNA, 20 bp, Unknown
  Description of Unknown: gRNA target site sequence
aaaagcaagcaagcagaatt

SEQ ID NO: 11528 - DNA, 20 bp, Unknown
  Description of Unknown: gRNA target site sequence
gaattcatccaatccaaatg

SEQ ID NO: 11529 - DNA, 20 bp, Unknown
  Description of Unknown: gRNA target site sequence
gcggcatcttcaaacctgaa

SEQ ID NO: 11530 - DNA, 20 bp, Unknown
  Description of Unknown: gRNA target site sequence
atcttcaaacctgaaaagaa

SEQ ID NO: 11531 - DNA, 20 bp, Unknown
  Description of Unknown: gRNA target site sequence
aaacctgaaaagaaaagaaa

SEQ ID NO: 11532 - DNA, 20 bp, Unknown
  Description of Unknown: gRNA target site sequence
aacctgaaaagaaaagaaaa

SEQ ID NO: 11533 - DNA, 20 bp, Unknown
  Description of Unknown: gRNA target site sequence
tgaaaagaaaagaaaaaggt

SEQ ID NO: 11534 - DNA, 20 bp, Unknown
  Description of Unknown: gRNA target site sequence
agcaatgaatttattttatt

SEQ ID NO: 11535 - DNA, 20 bp, Unknown
  Description of Unknown: gRNA target site sequence
aatttattttatttggattg

SEQ ID NO: 11536 - DNA, 20 bp, Unknown
  Description of Unknown: gRNA target site sequence
cttgtctaatttctactgtg

SEQ ID NO: 11537 - DNA, 20 bp, Unknown
  Description of Unknown: gRNA target site sequence
tgtgtagatcacctttttaa

SEQ ID NO: 11538 - DNA, 20 bp, Unknown
  Description of Unknown: gRNA target site sequence
gtagatcacctttttaaaag

SEQ ID NO: 11539 - DNA, 20 bp, Unknown
  Description of Unknown: gRNA target site sequence
gatcacctttttaaaagaag

SEQ ID NO: 11540 - DNA, 20 bp, Unknown
  Description of Unknown: gRNA target site sequence
ctttttaaaagaagtagctg

SEQ ID NO: 11541 - DNA, 20 bp, Unknown
  Description of Unknown: gRNA target site sequence
ttaaaagaagtagctgcaga

SEQ ID NO: 11542 - DNA, 20 bp, Unknown
  Description of Unknown: gRNA target site sequence
agttctccaaacccattata

SEQ ID NO: 11543 - DNA, 20 bp, Unknown
  Description of Unknown: gRNA target site sequence
ttctccaaacccattataaa

SEQ ID NO: 11544 - DNA, 20 bp, Unknown
  Description of Unknown: gRNA target site sequence
ttataaagagtatatcctgt

SEQ ID NO: 11545 - DNA, 20 bp, Unknown
  Description of Unknown: gRNA target site sequence
atcctgttagtgtatccctt

SEQ ID NO: 11546 - DNA, 20 bp, Unknown
  Description of Unknown: gRNA target site sequence
ctttggtgctcccaaaatct

SEQ ID NO: 11547 - DNA, 20 bp, Unknown
  Description of Unknown: gRNA target site sequence
tggtgctcccaaaatcttag

SEQ ID NO: 11548 - DNA, 20 bp, Unknown
  Description of Unknown: gRNA target site sequence
aaaatgctgatatgatgttt

SEQ ID NO: 11549 - DNA, 20 bp, Unknown
  Description of Unknown: gRNA target site sequence
tatgatgttttggtcaatga

SEQ ID NO: 11550 - DNA, 20 bp, Unknown
  Description of Unknown: gRNA target site sequence
atgatggactgtatatatga

SEQ ID NO: 11551 - DNA, 20 bp, Unknown
  Description of Unknown: gRNA target site sequence
atggactgtatatatgacag

SEQ ID NO: 11552 - DNA, 20 bp, Unknown
  Description of Unknown: gRNA target site sequence
atatatgacagtggtctcat

SEQ ID NO: 11553 - DNA, 20 bp, Unknown
  Description of Unknown: gRNA target site sequence
gtggtctcataagattaaaa

SEQ ID NO: 11554 - DNA, 20 bp, Unknown
  Description of Unknown: gRNA target site sequence
tttactgcaacttctatgtt

SEQ ID NO: 11555 - DNA, 20 bp, Unknown
  Description of Unknown: gRNA target site sequence
cattgtgttacaactgccca

SEQ ID NO: 11556 - DNA, 20 bp, Unknown
  Description of Unknown: gRNA target site sequence
ttacaactgcccacagtatt

SEQ ID NO: 11557 - DNA, 20 bp, Unknown
  Description of Unknown: gRNA target site sequence
actgcccacagtattcagta

SEQ ID NO: 11558 - DNA, 20 bp, Unknown
  Description of Unknown: gRNA target site sequence
cacagtattcagtacagtaa

SEQ ID NO: 11559 - DNA, 20 bp, Unknown
  Description of Unknown: gRNA target site sequence
acagtattcagtacagtaac

SEQ ID NO: 11560 - DNA, 20 bp, Unknown
  Description of Unknown: gRNA target site sequence
cagtacagtaacaggctgta

SEQ ID NO: 11561 - DNA, 20 bp, Unknown
  Description of Unknown: gRNA target site sequence
agtacagtaacaggctgtac

SEQ ID NO: 11562 - DNA, 20 bp, Unknown
  Description of Unknown: gRNA target site sequence
taacaggctgtacaggtttg

SEQ ID NO: 11563 - DNA, 20 bp, Unknown
  Description of Unknown: gRNA target site sequence
ggctgtacaggtttgtagtc

SEQ ID NO: 11564 - DNA, 20 bp, Unknown
  Description of Unknown: gRNA target site sequence
gctgtacaggtttgtagtct

SEQ ID NO: 11565 - DNA, 20 bp, Unknown
  Description of Unknown: gRNA target site sequence
tgtacaggtttgtagtctag

SEQ ID NO: 11566 - DNA, 20 bp, Unknown
  Description of Unknown: gRNA target site sequence
ggtttgtagtctaggagcaa

SEQ ID NO: 11567 - DNA, 20 bp, Unknown
  Description of Unknown: gRNA target site sequence
gtttgtagtctaggagcaat

SEQ ID NO: 11568 - DNA, 20 bp, Unknown
  Description of Unknown: gRNA target site sequence
gagcaataggctataccatg

SEQ ID NO: 11569 - DNA, 20 bp, Unknown
  Description of Unknown: gRNA target site sequence
taccatgtagcctatgcgtg

SEQ ID NO: 11570 - DNA, 20 bp, Unknown
  Description of Unknown: gRNA target site sequence
catgtagcctatgcgtgtag

SEQ ID NO: 11571 - DNA, 20 bp, Unknown
  Description of Unknown: gRNA target site sequence
atgtagcctatgcgtgtagt

SEQ ID NO: 11572 - DNA, 20 bp, Unknown
  Description of Unknown: gRNA target site sequence
gtgtagtaggctacaacacc

SEQ ID NO: 11573 - DNA, 20 bp, Unknown
  Description of Unknown: gRNA target site sequence
tgtagtaggctacaacacct

SEQ ID NO: 11574 - DNA, 20 bp, Unknown
  Description of Unknown: gRNA target site sequence
tacaacacctaggtttgtgt

SEQ ID NO: 11575 - DNA, 20 bp, Unknown
  Description of Unknown: gRNA target site sequence
aggtttgtgtaagcatttct

SEQ ID NO: 11576 - DNA, 20 bp, Unknown
  Description of Unknown: gRNA target site sequence
cagaacatgtccccgtcatt

SEQ ID NO: 11577 - DNA, 20 bp, Unknown
  Description of Unknown: gRNA target site sequence
taagtaacacatgactatat

SEQ ID NO: 11578 - DNA, 20 bp, Unknown
  Description of Unknown: gRNA target site sequence
agtaacacatgactatatta

SEQ ID NO: 11579 - DNA, 20 bp, Unknown
  Description of Unknown: gRNA target site sequence
cacatgactatattagagtt

SEQ ID NO: 11580 - DNA, 20 bp, Unknown
  Description of Unknown: gRNA target site sequence
acatgactatattagagttc

SEQ ID NO: 11581 - DNA, 20 bp, Unknown
  Description of Unknown: gRNA target site sequence
ctatattagagttcaggtcc

SEQ ID NO: 11582 - DNA, 20 bp, Unknown
  Description of Unknown: gRNA target site sequence
ctggctctacaatttactaa

SEQ ID NO: 11583 - DNA, 20 bp, Unknown
  Description of Unknown: gRNA target site sequence
caatttactaacagtgtgac

SEQ ID NO: 11584 - DNA, 20 bp, Unknown
  Description of Unknown: gRNA target site sequence
aatttactaacagtgtgact

SEQ ID NO: 11585 - DNA, 20 bp, Unknown
  Description of Unknown: gRNA target site sequence
ttactaacagtgtgactggg

SEQ ID NO: 11586 - DNA, 20 bp, Unknown
  Description of Unknown: gRNA target site sequence
cccaaatcaattccctgttc

SEQ ID NO: 11587 - DNA, 20 bp, Unknown
  Description of Unknown: gRNA target site sequence
ttccctgttctagaatataa

SEQ ID NO: 11588 - DNA, 20 bp, Unknown
  Description of Unknown: gRNA target site sequence
tccctgttctagaatataac

SEQ ID NO: 11589 - DNA, 20 bp, Unknown
  Description of Unknown: gRNA target site sequence
cctgttctagaatataacag

SEQ ID NO: 11590 - DNA, 20 bp, Unknown
  Description of Unknown: gRNA target site sequence
aatataacaggagatttgaa

SEQ ID NO: 11591 - DNA, 20 bp, Unknown
  Description of Unknown: gRNA target site sequence
atataacaggagatttgaat

SEQ ID NO: 11592 - DNA, 20 bp, Unknown
  Description of Unknown: gRNA target site sequence
tataacaggagatttgaatg

SEQ ID NO: 11593 - DNA, 20 bp, Unknown
  Description of Unknown: gRNA target site sequence
aggagatttgaatggggttt

SEQ ID NO: 11594 - DNA, 20 bp, Unknown
  Description of Unknown: gRNA target site sequence
gtttcagcatcaatgtaccc

SEQ ID NO: 11595 - DNA, 20 bp, Unknown
  Description of Unknown: gRNA target site sequence
tttcagcatcaatgtaccct

SEQ ID NO: 11596 - DNA, 20 bp, Unknown
  Description of Unknown: gRNA target site sequence
cagcatcaatgtaccctggg

SEQ ID NO: 11597 - DNA, 20 bp, Unknown
  Description of Unknown: gRNA target site sequence
catcaatgtaccctgggcag

SEQ ID NO: 11598 - DNA, 20 bp, Unknown
  Description of Unknown: gRNA target site sequence
ggcagtagaatttcattgaa

SEQ ID NO: 11599 - DNA, 20 bp, Unknown
  Description of Unknown: gRNA target site sequence
gaatttcattgaaaagcctt

SEQ ID NO: 11600 - DNA, 20 bp, Unknown
  Description of Unknown: gRNA target site sequence
aagcctttggactccaacta

SEQ ID NO: 11601 - DNA, 20 bp, Unknown
  Description of Unknown: gRNA target site sequence
ttggactccaactaaagatg

SEQ ID NO: 11602 - DNA, 20 bp, Unknown
  Description of Unknown: gRNA target site sequence
ggactccaactaaagatgca

SEQ ID NO: 11603 - DNA, 20 bp, Unknown
  Description of Unknown: gRNA target site sequence
ctccaactaaagatgcagag

SEQ ID NO: 11604 - DNA, 20 bp, Unknown
  Description of Unknown: gRNA target site sequence
ctaaagatgcagagaagtcc

SEQ ID NO: 11605 - DNA, 20 bp, Unknown
  Description of Unknown: gRNA target site sequence
tcctccctctctcttgcttc

SEQ ID NO: 11606 - DNA, 20 bp, Unknown
  Description of Unknown: gRNA target site sequence
ctccctctctcttgcttctg

SEQ ID NO: 11607 - DNA, 20 bp, Unknown
  Description of Unknown: gRNA target site sequence
cttgcttctggagctccttg

SEQ ID NO: 11608 - DNA, 20 bp, Unknown
  Description of Unknown: gRNA target site sequence
ccttgtagttacatctatta

SEQ ID NO: 11609 - DNA, 20 bp, Unknown
  Description of Unknown: gRNA target site sequence
tattatagtatcattatatc

SEQ ID NO: 11610 - DNA, 20 bp, Unknown
  Description of Unknown: gRNA target site sequence
ctgtttccctttatctcctc

SEQ ID NO: 11611 - DNA, 20 bp, Unknown
  Description of Unknown: gRNA target site sequence
tttccctttatctcctctag

SEQ ID NO: 11612 - DNA, 20 bp, Unknown
  Description of Unknown: gRNA target site sequence
ctttatctcctctagtggcc

SEQ ID NO: 11613 - DNA, 20 bp, Unknown
  Description of Unknown: gRNA target site sequence
tttatctcctctagtggcct

SEQ ID NO: 11614 - DNA, 20 bp, Unknown
  Description of Unknown: gRNA target site sequence
ctagtggcctgggaacctct

SEQ ID NO: 11615 - DNA, 20 bp, Unknown
  Description of Unknown: gRNA target site sequence
agtggcctgggaacctctaa

SEQ ID NO: 11616 - DNA, 20 bp, Unknown
  Description of Unknown: gRNA target site sequence
gtggcctgggaacctctaag

SEQ ID NO: 11617 - DNA, 20 bp, Unknown
  Description of Unknown: gRNA target site sequence
gaacctctaagaggcaaaca

SEQ ID NO: 11618 - DNA, 20 bp, Unknown
  Description of Unknown: gRNA target site sequence
aggcaaacacagtccccata

SEQ ID NO: 11619 - DNA, 20 bp, Unknown
  Description of Unknown: gRNA target site sequence
ggcaaacacagtccccatac

SEQ ID NO: 11620 - DNA, 20 bp, Unknown
  Description of Unknown: gRNA target site sequence
acacagtccccatacaggaa

SEQ ID NO: 11621 - DNA, 20 bp, Unknown
  Description of Unknown: gRNA target site sequence
cacagtccccatacaggaat

SEQ ID NO: 11622 - DNA, 20 bp, Unknown
  Description of Unknown: gRNA target site sequence
atacaggaatgggatgtctg

SEQ ID NO: 11623 - DNA, 20 bp, Unknown
  Description of Unknown: gRNA target site sequence
acaggaatgggatgtctgca

SEQ ID NO: 11624 - DNA, 20 bp, Unknown
  Description of Unknown: gRNA target site sequence
taactcctctcttctgtctg

SEQ ID NO: 11625 - DNA, 20 bp, Unknown
  Description of Unknown: gRNA target site sequence
gaataaaacaacattataca

SEQ ID NO: 11626 - DNA, 20 bp, Unknown
  Description of Unknown: gRNA target site sequence
aataaaacaacattatacaa

SEQ ID NO: 11627 - DNA, 20 bp, Unknown
  Description of Unknown: gRNA target site sequence
aacaacattatacaaaggaa

SEQ ID NO: 11628 - DNA, 20 bp, Unknown
  Description of Unknown: gRNA target site sequence
caacattatacaaaggaaaa

SEQ ID NO: 11629 - DNA, 20 bp, Unknown
  Description of Unknown: gRNA target site sequence
cattatacaaaggaaaagag

SEQ ID NO: 11630 - DNA, 20 bp, Unknown
  Description of Unknown: gRNA target site sequence
agtggttcattttctctcct

SEQ ID NO: 11631 - DNA, 20 bp, Unknown
  Description of Unknown: gRNA target site sequence
ggttcattttctctcctcag

SEQ ID NO: 11632 - DNA, 20 bp, Unknown
  Description of Unknown: gRNA target site sequence
ttcattttctctcctcagca

SEQ ID NO: 11633 - DNA, 20 bp, Unknown
  Description of Unknown: gRNA target site sequence
ctcagcagagatgtccaatg

SEQ ID NO: 11634 - DNA, 20 bp, Unknown
  Description of Unknown: gRNA target site sequence
agagatgtccaatgtggaaa

SEQ ID NO: 11635 - DNA, 20 bp, Unknown
  Description of Unknown: gRNA target site sequence
gatgtccaatgtggaaatgg

SEQ ID NO: 11636 - DNA, 20 bp, Unknown
  Description of Unknown: gRNA target site sequence
gtccaatgtggaaatggcag

SEQ ID NO: 11637 - DNA, 20 bp, Unknown
  Description of Unknown: gRNA target site sequence
aatgtggaaatggcagaaga

SEQ ID NO: 11638 - DNA, 20 bp, Unknown
  Description of Unknown: gRNA target site sequence
aaatggcagaagaaagatca

SEQ ID NO: 11639 - DNA, 20 bp, Unknown
  Description of Unknown: gRNA target site sequence
gaagaaagatcaaagccttg

SEQ ID NO: 11640 - DNA, 20 bp, Unknown
  Description of Unknown: gRNA target site sequence
aagaaagatcaaagccttgc

SEQ ID NO: 11641 - DNA, 20 bp, Unknown
  Description of Unknown: gRNA target site sequence
tcaaagccttgcaggtaatg

SEQ ID NO: 11642 - DNA, 20 bp, Unknown
  Description of Unknown: gRNA target site sequence
caaagccttgcaggtaatgt

SEQ ID NO: 11643 - DNA, 20 bp, Unknown
  Description of Unknown: gRNA target site sequence
tttatcctgcaataccatac

SEQ ID NO: 11644 - DNA, 20 bp, Unknown
  Description of Unknown: gRNA target site sequence
atcctgcaataccatactgg

SEQ ID NO: 11645 - DNA, 20 bp, Unknown
  Description of Unknown: gRNA target site sequence
cagttcctttgccctctctg

SEQ ID NO: 11646 - DNA, 20 bp, Unknown
  Description of Unknown: gRNA target site sequence
gttcctttgccctctctgta

SEQ ID NO: 11647 - DNA, 20 bp, Unknown
  Description of Unknown: gRNA target site sequence
ttcctttgccctctctgtag

SEQ ID NO: 11648 - DNA, 20 bp, Unknown
  Description of Unknown: gRNA target site sequence
tcctttgccctctctgtaga

SEQ ID NO: 11649 - DNA, 20 bp, Unknown
  Description of Unknown: gRNA target site sequence
ttgccctctctgtagagggt

SEQ ID NO: 11650 - DNA, 20 bp, Unknown
  Description of Unknown: gRNA target site sequence
tctgtagagggtcagtaata

SEQ ID NO: 11651 - DNA, 20 bp, Unknown
  Description of Unknown: gRNA target site sequence
gtcagtaatatggccatacc

SEQ ID NO: 11652 - DNA, 20 bp, Unknown
  Description of Unknown: gRNA target site sequence
tcagtaatatggccatacct

SEQ ID NO: 11653 - DNA, 20 bp, Unknown
  Description of Unknown: gRNA target site sequence
cagtaatatggccatacctg

SEQ ID NO: 11654 - DNA, 20 bp, Unknown
  Description of Unknown: gRNA target site sequence
accttcttcatgccactcca

SEQ ID NO: 11655 - DNA, 20 bp, Unknown
  Description of Unknown: gRNA target site sequence
ccttcttcatgccactccac

SEQ ID NO: 11656 - DNA, 20 bp, Unknown
  Description of Unknown: gRNA target site sequence
ttcttcatgccactccacag

SEQ ID NO: 11657 - DNA, 20 bp, Unknown
  Description of Unknown: gRNA target site sequence
ttcatgccactccacaggag

SEQ ID NO: 11658 - DNA, 20 bp, Unknown
  Description of Unknown: gRNA target site sequence
tcatgccactccacaggaga

SEQ ID NO: 11659 - DNA, 20 bp, Unknown
  Description of Unknown: gRNA target site sequence
catgccactccacaggagaa

SEQ ID NO: 11660 - DNA, 20 bp, Unknown
  Description of Unknown: gRNA target site sequence
gagaagggaacatgaccctg

SEQ ID NO: 11661 - DNA, 20 bp, Unknown
  Description of Unknown: gRNA target site sequence
agaagggaacatgaccctgt

SEQ ID NO: 11662 - DNA, 20 bp, Unknown
  Description of Unknown: gRNA target site sequence
ctctgtcaatgttctccaca

SEQ ID NO: 11663 - DNA, 20 bp, Unknown
  Description of Unknown: gRNA target site sequence
caatgttctccacatagtga

SEQ ID NO: 11664 - DNA, 20 bp, Unknown
  Description of Unknown: gRNA target site sequence
catagtgagggttatcatgt

SEQ ID NO: 11665 - DNA, 20 bp, Unknown
  Description of Unknown: gRNA target site sequence
tagtgagggttatcatgtta

SEQ ID NO: 11666 - DNA, 20 bp, Unknown
  Description of Unknown: gRNA target site sequence
atgttagagctgtctataaa

SEQ ID NO: 11667 - DNA, 20 bp, Unknown
  Description of Unknown: gRNA target site sequence
agctgtctataaatagtcct

SEQ ID NO: 11668 - DNA, 20 bp, Unknown
  Description of Unknown: gRNA target site sequence
gctgtctataaatagtcctc

SEQ ID NO: 11669 - DNA, 20 bp, Unknown
  Description of Unknown: gRNA target site sequence
tctataaatagtcctcagga

SEQ ID NO: 11670 - DNA, 20 bp, Unknown
  Description of Unknown: gRNA target site sequence
tgaaacaaaaacattttctc

SEQ ID NO: 11671 - DNA, 20 bp, Unknown
  Description of Unknown: gRNA target site sequence
gaaacaaaaacattttctca

SEQ ID NO: 11672 - DNA, 20 bp, Unknown
  Description of Unknown: gRNA target site sequence
acatgtctcgatctatgaaa

SEQ ID NO: 11673 - DNA, 20 bp, Unknown
  Description of Unknown: gRNA target site sequence
gtctcgatctatgaaaaaga

SEQ ID NO: 11674 - DNA, 20 bp, Unknown
  Description of Unknown: gRNA target site sequence
tcgatctatgaaaaagacag

SEQ ID NO: 11675 - DNA, 20 bp, Unknown
  Description of Unknown: gRNA target site sequence
gatctatgaaaaagacagtg

SEQ ID NO: 11676 - DNA, 20 bp, Unknown
  Description of Unknown: gRNA target site sequence
aaaagacagtggagaaaaaa

SEQ ID NO: 11677 - DNA, 20 bp, Unknown
  Description of Unknown: gRNA target site sequence
aaagacagtggagaaaaaaa

SEQ ID NO: 11678 - DNA, 20 bp, Unknown
  Description of Unknown: gRNA target site sequence
gacagtggagaaaaaaaagg

SEQ ID NO: 11679 - DNA, 20 bp, Unknown
  Description of Unknown: gRNA target site sequence
agaaaaaaaaggaagacatt

SEQ ID NO: 11680 - DNA, 20 bp, Unknown
  Description of Unknown: gRNA target site sequence
gtactaacaaatgtctaaaa

SEQ ID NO: 11681 - DNA, 20 bp, Unknown
  Description of Unknown: gRNA target site sequence
taacaaatgtctaaaatggt

SEQ ID NO: 11682 - DNA, 20 bp, Unknown
  Description of Unknown: gRNA target site sequence
tgtctaaaatggttagaaat

SEQ ID NO: 11683 - DNA, 20 bp, Unknown
  Description of Unknown: gRNA target site sequence
gtctaaaatggttagaaata

SEQ ID NO: 11684 - DNA, 20 bp, Unknown
  Description of Unknown: gRNA target site sequence
aaaatggttagaaataaggc

SEQ ID NO: 11685 - DNA, 20 bp, Unknown
  Description of Unknown: gRNA target site sequence
atggttagaaataaggctgg

SEQ ID NO: 11686 - DNA, 20 bp, Unknown
  Description of Unknown: gRNA target site sequence
tagaaataaggctggcagaa

SEQ ID NO: 11687 - DNA, 20 bp, Unknown
  Description of Unknown: gRNA target site sequence
agaaataaggctggcagaat

SEQ ID NO: 11688 - DNA, 20 bp, Unknown
  Description of Unknown: gRNA target site sequence
ctacccatgaatacattgtt

SEQ ID NO: 11689 - DNA, 20 bp, Unknown
  Description of Unknown: gRNA target site sequence
acccatgaatacattgttta

SEQ ID NO: 11690 - DNA, 20 bp, Unknown
  Description of Unknown: gRNA target site sequence
atacattgtttagagctacc

SEQ ID NO: 11691 - DNA, 20 bp, Unknown
  Description of Unknown: gRNA target site sequence
cattgtttagagctacccag

SEQ ID NO: 11692 - DNA, 20 bp, Unknown
  Description of Unknown: gRNA target site sequence
attgtttagagctacccagc

SEQ ID NO: 11693 - DNA, 20 bp, Unknown
  Description of Unknown: gRNA target site sequence
tagagctacccagcaggaac

SEQ ID NO: 11694 - DNA, 20 bp, Unknown
  Description of Unknown: gRNA target site sequence
caggaacaagcccttcctac

SEQ ID NO: 11695 - DNA, 20 bp, Unknown
  Description of Unknown: gRNA target site sequence
caagcccttcctactagcct

SEQ ID NO: 11696 - DNA, 20 bp, Unknown
  Description of Unknown: gRNA target site sequence
actagcctcagataccaatc

SEQ ID NO: 11697 - DNA, 20 bp, Unknown
  Description of Unknown: gRNA target site sequence
gcctcagataccaatccagc

SEQ ID NO: 11698 - DNA, 20 bp, Unknown
  Description of Unknown: gRNA target site sequence
cagataccaatccagccaga

SEQ ID NO: 11699 - DNA, 20 bp, Unknown
  Description of Unknown: gRNA target site sequence
ccaatccagccagaaagtac

SEQ ID NO: 11700 - DNA, 20 bp, Unknown
  Description of Unknown: gRNA target site sequence
aatccagccagaaagtactg

SEQ ID NO: 11701 - DNA, 20 bp, Unknown
  Description of Unknown: gRNA target site sequence
ccagccagaaagtactggag

SEQ ID NO: 11702 - DNA, 20 bp, Unknown
  Description of Unknown: gRNA target site sequence
cagaaagtactggagaagtc

SEQ ID NO: 11703 - DNA, 20 bp, Unknown
  Description of Unknown: gRNA target site sequence
agaaagtactggagaagtcc

SEQ ID NO: 11704 - DNA, 20 bp, Unknown
  Description of Unknown: gRNA target site sequence
actggagaagtccaggatta

SEQ ID NO: 11705 - DNA, 20 bp, Unknown
  Description of Unknown: gRNA target site sequence
ctggagaagtccaggattat

SEQ ID NO: 11706 - DNA, 20 bp, Unknown
  Description of Unknown: gRNA target site sequence
agtccaggattataggatgc

SEQ ID NO: 11707 - DNA, 20 bp, Unknown
  Description of Unknown: gRNA target site sequence
gtccaggattataggatgct

SEQ ID NO: 11708 - DNA, 20 bp, Unknown
  Description of Unknown: gRNA target site sequence
aggattataggatgctagga

SEQ ID NO: 11709 - DNA, 20 bp, Unknown
  Description of Unknown: gRNA target site sequence
attataggatgctaggacag

SEQ ID NO: 11710 - DNA, 20 bp, Unknown
  Description of Unknown: gRNA target site sequence
ttataggatgctaggacagc

SEQ ID NO: 11711 - DNA, 20 bp, Unknown
  Description of Unknown: gRNA target site sequence
gacagcaggacttacaaaca

SEQ ID NO: 11712 - DNA, 20 bp, Unknown
  Description of Unknown: gRNA target site sequence
acagcaggacttacaaacaa

SEQ ID NO: 11713 - DNA, 20 bp, Unknown
  Description of Unknown: gRNA target site sequence
acaaaggcctataccttctt

SEQ ID NO: 11714 - DNA, 20 bp, Unknown
  Description of Unknown: gRNA target site sequence
accttcttgagatgttcgtt

SEQ ID NO: 11715 - DNA, 20 bp, Unknown
  Description of Unknown: gRNA target site sequence
ttcagtgctaaatatacctg

SEQ ID NO: 11716 - DNA, 20 bp, Unknown
  Description of Unknown: gRNA target site sequence
tatacctgaagctgccacaa

SEQ ID NO: 11717 - DNA, 20 bp, Unknown
  Description of Unknown: gRNA target site sequence
cctgaagctgccacaaaagc

SEQ ID NO: 11718 - DNA, 20 bp, Unknown
  Description of Unknown: gRNA target site sequence
tgaagctgccacaaaagcta

SEQ ID NO: 11719 - DNA, 20 bp, Unknown
  Description of Unknown: gRNA target site sequence
gaagctgccacaaaagctag

SEQ ID NO: 11720 - DNA, 20 bp, Unknown
  Description of Unknown: gRNA target site sequence
gctgccacaaaagctagagg

SEQ ID NO: 11721 - DNA, 20 bp, Unknown
  Description of Unknown: gRNA target site sequence
ccacaaaagctagaggaagc

SEQ ID NO: 11722 - DNA, 20 bp, Unknown
  Description of Unknown: gRNA target site sequence
caaaagctagaggaagccag

SEQ ID NO: 11723 - DNA, 20 bp, Unknown
  Description of Unknown: gRNA target site sequence
aaaagctagaggaagccagt

SEQ ID NO: 11724 - DNA, 20 bp, Unknown
  Description of Unknown: gRNA target site sequence
gctagaggaagccagtaggt

SEQ ID NO: 11725 - DNA, 20 bp, Unknown
  Description of Unknown: gRNA target site sequence
agaggaagccagtaggtaag

SEQ ID NO: 11726 - DNA, 20 bp, Unknown
  Description of Unknown: gRNA target site sequence
gccagtaggtaagaagtgtt

SEQ ID NO: 11727 - DNA, 20 bp, Unknown
  Description of Unknown: gRNA target site sequence
cagtaggtaagaagtgttaa

SEQ ID NO: 11728 - DNA, 20 bp, Unknown
  Description of Unknown: gRNA target site sequence
gagtgtatatgtatttgtgc

SEQ ID NO: 11729 - DNA, 20 bp, Unknown
  Description of Unknown: gRNA target site sequence
tgctgctccctgctcaactg

SEQ ID NO: 11730 - DNA, 20 bp, Unknown
  Description of Unknown: gRNA target site sequence
gctgctccctgctcaactgc

SEQ ID NO: 11731 - DNA, 20 bp, Unknown
  Description of Unknown: gRNA target site sequence
ctgctccctgctcaactgca

SEQ ID NO: 11732 - DNA, 20 bp, Unknown
  Description of Unknown: gRNA target site sequence
ctcaactgcagggaaactac

SEQ ID NO: 11733 - DNA, 20 bp, Unknown
  Description of Unknown: gRNA target site sequence
ctgcagggaaactactggtt

SEQ ID NO: 11734 - DNA, 20 bp, Unknown
  Description of Unknown: gRNA target site sequence
tcagaaaccatgctgtgcat

SEQ ID NO: 11735 - DNA, 20 bp, Unknown
  Description of Unknown: gRNA target site sequence
catgctgtgcatcagtatct

SEQ ID NO: 11736 - DNA, 20 bp, Unknown
  Description of Unknown: gRNA target site sequence
gctgtgcatcagtatctcag

SEQ ID NO: 11737 - DNA, 20 bp, Unknown
  Description of Unknown: gRNA target site sequence
ctgtgcatcagtatctcagc

SEQ ID NO: 11738 - DNA, 20 bp, Unknown
  Description of Unknown: gRNA target site sequence
gtgccactaatctgatcttt

SEQ ID NO: 11739 - DNA, 20 bp, Unknown
  Description of Unknown: gRNA target site sequence
tccctgacaatcccaatatg

SEQ ID NO: 11740 - DNA, 20 bp, Unknown
  Description of Unknown: gRNA target site sequence
aatatgcagattgtttatat

SEQ ID NO: 11741 - DNA, 20 bp, Unknown
  Description of Unknown: gRNA target site sequence
tgcagattgtttatatcaga

SEQ ID NO: 11742 - DNA, 20 bp, Unknown
  Description of Unknown: gRNA target site sequence
gcagattgtttatatcagat

SEQ ID NO: 11743 - DNA, 20 bp, Unknown
  Description of Unknown: gRNA target site sequence
attgtttatatcagatggga

SEQ ID NO: 11744 - DNA, 20 bp, Unknown
  Description of Unknown: gRNA target site sequence
ttgtttatatcagatgggat

SEQ ID NO: 11745 - DNA, 20 bp, Unknown
  Description of Unknown: gRNA target site sequence
cagatgggatgggactcatt

SEQ ID NO: 11746 - DNA, 20 bp, Unknown
  Description of Unknown: gRNA target site sequence
agatgggatgggactcattc

SEQ ID NO: 11747 - DNA, 20 bp, Unknown
  Description of Unknown: gRNA target site sequence
gatgggatgggactcattca

SEQ ID NO: 11748 - DNA, 20 bp, Unknown
  Description of Unknown: gRNA target site sequence
gggatgggactcattcaggg

SEQ ID NO: 11749 - DNA, 20 bp, Unknown
  Description of Unknown: gRNA target site sequence
gggactcattcagggtagta

SEQ ID NO: 11750 - DNA, 20 bp, Unknown
  Description of Unknown: gRNA target site sequence
cattcagggtagtatggcca

SEQ ID NO: 11751 - DNA, 20 bp, Unknown
  Description of Unknown: gRNA target site sequence
catagaccttttttatatca

SEQ ID NO: 11752 - DNA, 20 bp, Unknown
  Description of Unknown: gRNA target site sequence
agaccttttttatatcaaag

SEQ ID NO: 11753 - DNA, 20 bp, Unknown
  Description of Unknown: gRNA target site sequence
gactactcatacacaacttt

SEQ ID NO: 11754 - DNA, 20 bp, Unknown
  Description of Unknown: gRNA target site sequence
tactcatacacaactttcag

SEQ ID NO: 11755 - DNA, 20 bp, Unknown
  Description of Unknown: gRNA target site sequence
caactttcagcagcttacaa

SEQ ID NO: 11756 - DNA, 20 bp, Unknown
  Description of Unknown: gRNA target site sequence
agcagcttacaaaagaatgt

SEQ ID NO: 11757 - DNA, 20 bp, Unknown
  Description of Unknown: gRNA target site sequence
cttaccccacttaactatct

SEQ ID NO: 11758 - DNA, 20 bp, Unknown
  Description of Unknown: gRNA target site sequence
ttaccccacttaactatctt

SEQ ID NO: 11759 - DNA, 20 bp, Unknown
  Description of Unknown: gRNA target site sequence
aactatcttgggctgtgaca

SEQ ID NO: 11760 - DNA, 20 bp, Unknown
  Description of Unknown: gRNA target site sequence
tgggctgtgacaaagtcaca

SEQ ID NO: 11761 - DNA, 20 bp, Unknown
  Description of Unknown: gRNA target site sequence
acaaagtcacatggttcaca

SEQ ID NO: 11762 - DNA, 20 bp, Unknown
  Description of Unknown: gRNA target site sequence
aagtcacatggttcacacgg

SEQ ID NO: 11763 - DNA, 20 bp, Unknown
  Description of Unknown: gRNA target site sequence
agtcacatggttcacacggc

SEQ ID NO: 11764 - DNA, 20 bp, Unknown
  Description of Unknown: gRNA target site sequence
gcaggcatactcatcttttt

SEQ ID NO: 11765 - DNA, 20 bp, Unknown
  Description of Unknown: gRNA target site sequence
ggcatactcatctttttcag

SEQ ID NO: 11766 - DNA, 20 bp, Unknown
  Description of Unknown: gRNA target site sequence
gcatactcatctttttcagt

SEQ ID NO: 11767 - DNA, 20 bp, Unknown
  Description of Unknown: gRNA target site sequence
catactcatctttttcagtg

SEQ ID NO: 11768 - DNA, 20 bp, Unknown
  Description of Unknown: gRNA target site sequence
atactcatctttttcagtgg

SEQ ID NO: 11769 - DNA, 20 bp, Unknown
  Description of Unknown: gRNA target site sequence
tttttcagtgggggtgaatt

SEQ ID NO: 11770 - DNA, 20 bp, Unknown
  Description of Unknown: gRNA target site sequence
cagtgggggtgaattcagtg

SEQ ID NO: 11771 - DNA, 20 bp, Unknown
  Description of Unknown: gRNA target site sequence
gggtgaattcagtgtagtac

SEQ ID NO: 11772 - DNA, 20 bp, Unknown
  Description of Unknown: gRNA target site sequence
gtgaattcagtgtagtacaa

SEQ ID NO: 11773 - DNA, 20 bp, Unknown
  Description of Unknown: gRNA target site sequence
attcagtgtagtacaagaga

SEQ ID NO: 11774 - DNA, 20 bp, Unknown
  Description of Unknown: gRNA target site sequence
agtgtagtacaagagataga

SEQ ID NO: 11775 - DNA, 20 bp, Unknown
  Description of Unknown: gRNA target site sequence
agtacaagagatagaaagac

SEQ ID NO: 11776 - DNA, 20 bp, Unknown
  Description of Unknown: gRNA target site sequence
gaaagaccagtccttgctga

SEQ ID NO: 11777 - DNA, 20 bp, Unknown
  Description of Unknown: gRNA target site sequence
accagtccttgctgaaagac

SEQ ID NO: 11778 - DNA, 20 bp, Unknown
  Description of Unknown: gRNA target site sequence
tcaattctctctccattctt

SEQ ID NO: 11779 - DNA, 20 bp, Unknown
  Description of Unknown: gRNA target site sequence
ttctctctccattcttcagt

SEQ ID NO: 11780 - DNA, 20 bp, Unknown
  Description of Unknown: gRNA target site sequence
cagtaagtcaacttcaatgt

SEQ ID NO: 11781 - DNA, 20 bp, Unknown
  Description of Unknown: gRNA target site sequence
aagtcaacttcaatgtcgga

SEQ ID NO: 11782 - DNA, 20 bp, Unknown
  Description of Unknown: gRNA target site sequence
aatgtcggatggatgaaacc

SEQ ID NO: 11783 - DNA, 20 bp, Unknown
  Description of Unknown: gRNA target site sequence
atggatgaaacccagacaca

SEQ ID NO: 11784 - DNA, 20 bp, Unknown
  Description of Unknown: gRNA target site sequence
aacccagacacatagcaatt

SEQ ID NO: 11785 - DNA, 20 bp, Unknown
  Description of Unknown: gRNA target site sequence
acccagacacatagcaattc

SEQ ID NO: 11786 - DNA, 20 bp, Unknown
  Description of Unknown: gRNA target site sequence
tttgactttccattctctgc

SEQ ID NO: 11787 - DNA, 20 bp, Unknown
  Description of Unknown: gRNA target site sequence
cattctctgctggatgacgt

SEQ ID NO: 11788 - DNA, 20 bp, Unknown
  Description of Unknown: gRNA target site sequence
cgtgagtaaacctgaatctt

SEQ ID NO: 11789 - DNA, 20 bp, Unknown
  Description of Unknown: gRNA target site sequence
tgagtaaacctgaatctttg

SEQ ID NO: 11790 - DNA, 20 bp, Unknown
  Description of Unknown: gRNA target site sequence
cctgaatctttggagtacct

SEQ ID NO: 11791 - DNA, 20 bp, Unknown
  Description of Unknown: gRNA target site sequence
ctgaatctttggagtacctg

SEQ ID NO: 11792 - DNA, 20 bp, Unknown
  Description of Unknown: gRNA target site sequence
ttggagtacctgaggaatat

SEQ ID NO: 11793 - DNA, 20 bp, Unknown
  Description of Unknown: gRNA target site sequence
tggagtacctgaggaatatc

SEQ ID NO: 11794 - DNA, 20 bp, Unknown
  Description of Unknown: gRNA target site sequence
tacctgaggaatatcgggaa

SEQ ID NO: 11795 - DNA, 20 bp, Unknown
  Description of Unknown: gRNA target site sequence
aaaagacacattaatattgc

SEQ ID NO: 11796 - DNA, 20 bp, Unknown
  Description of Unknown: gRNA target site sequence
aaagacacattaatattgcc

SEQ ID NO: 11797 - DNA, 20 bp, Unknown
  Description of Unknown: gRNA target site sequence
aagacacattaatattgcca

SEQ ID NO: 11798 - DNA, 20 bp, Unknown
  Description of Unknown: gRNA target site sequence
tattgccagggtatttcact

SEQ ID NO: 11799 - DNA, 20 bp, Unknown
  Description of Unknown: gRNA target site sequence
attgccagggtatttcactt

SEQ ID NO: 11800 - DNA, 20 bp, Unknown
  Description of Unknown: gRNA target site sequence
ttgccagggtatttcacttg

SEQ ID NO: 11801 - DNA, 20 bp, Unknown
  Description of Unknown: gRNA target site sequence
tatttcacttggggctaact

SEQ ID NO: 11802 - DNA, 20 bp, Unknown
  Description of Unknown: gRNA target site sequence
cttggggctaacttggtgtc

SEQ ID NO: 11803 - DNA, 20 bp, Unknown
  Description of Unknown: gRNA target site sequence
aacttggtgtcaagctatat

SEQ ID NO: 11804 - DNA, 20 bp, Unknown
  Description of Unknown: gRNA target site sequence
acttggtgtcaagctatatc

SEQ ID NO: 11805 - DNA, 20 bp, Unknown
  Description of Unknown: gRNA target site sequence
gtcaagctatatcaggcacc

SEQ ID NO: 11806 - DNA, 20 bp, Unknown
  Description of Unknown: gRNA target site sequence
aggcaccaagtgtttacatt

SEQ ID NO: 11807 - DNA, 20 bp, Unknown
  Description of Unknown: gRNA target site sequence
tcccaattccatttccactc

SEQ ID NO: 11808 - DNA, 20 bp, Unknown
  Description of Unknown: gRNA target site sequence
catttccactctggccaaat

SEQ ID NO: 11809 - DNA, 20 bp, Unknown
  Description of Unknown: gRNA target site sequence
tgagcttccaccttcccaac

SEQ ID NO: 11810 - DNA, 20 bp, Unknown
  Description of Unknown: gRNA target site sequence
aacaagccacctccattttg

SEQ ID NO: 11811 - DNA, 20 bp, Unknown
  Description of Unknown: gRNA target site sequence
ttgaagaataaaccgtgact

SEQ ID NO: 11812 - DNA, 20 bp, Unknown
  Description of Unknown: gRNA target site sequence
tgccttttttgttttttttc

SEQ ID NO: 11813 - DNA, 20 bp, Unknown
  Description of Unknown: gRNA target site sequence
cttttttgttttttttctag

SEQ ID NO: 11814 - DNA, 20 bp, Unknown
  Description of Unknown: gRNA target site sequence
ttttttttctagcagatttc

SEQ ID NO: 11815 - DNA, 20 bp, Unknown
  Description of Unknown: gRNA target site sequence
tttttctagcagatttctag

SEQ ID NO: 11816 - DNA, 20 bp, Unknown
  Description of Unknown: gRNA target site sequence
ctagcagtatcttctgtcac

SEQ ID NO: 11817 - DNA, 20 bp, Unknown
  Description of Unknown: gRNA target site sequence
agcagtatcttctgtcactg

SEQ ID NO: 11818 - DNA, 20 bp, Unknown
  Description of Unknown: gRNA target site sequence
ggagattgcgctgcattttt

SEQ ID NO: 11819 - DNA, 20 bp, Unknown
  Description of Unknown: gRNA target site sequence
agattgcgctgcatttttaa

SEQ ID NO: 11820 - DNA, 20 bp, Unknown
  Description of Unknown: gRNA target site sequence
catttttaagagcctttctc

SEQ ID NO: 11821 - DNA, 20 bp, Unknown
  Description of Unknown: gRNA target site sequence
tttttaagagcctttctctg

SEQ ID NO: 11822 - DNA, 20 bp, Unknown
  Description of Unknown: gRNA target site sequence
ttttaagagcctttctctgg

SEQ ID NO: 11823 - DNA, 20 bp, Unknown
  Description of Unknown: gRNA target site sequence
gcctttctctggaggctctc

SEQ ID NO: 11824 - DNA, 20 bp, Unknown
  Description of Unknown: gRNA target site sequence
cctttctctggaggctctca

SEQ ID NO: 11825 - DNA, 20 bp, Unknown
  Description of Unknown: gRNA target site sequence
aaggacttctgatgccctct

SEQ ID NO: 11826 - DNA, 20 bp, Unknown
  Description of Unknown: gRNA target site sequence
tgatgccctctcagcactca

SEQ ID NO: 11827 - DNA, 20 bp, Unknown
  Description of Unknown: gRNA target site sequence
cattccttaacacatcactc

SEQ ID NO: 11828 - DNA, 20 bp, Unknown
  Description of Unknown: gRNA target site sequence
ttccttaacacatcactcaa

SEQ ID NO: 11829 - DNA, 20 bp, Unknown
  Description of Unknown: gRNA target site sequence
actcaagagtctacatgatt

SEQ ID NO: 11830 - DNA, 20 bp, Unknown
  Description of Unknown: gRNA target site sequence
agtctacatgatttggcccc

SEQ ID NO: 11831 - DNA, 20 bp, Unknown
  Description of Unknown: gRNA target site sequence
tggccccaagatacttttca

SEQ ID NO: 11832 - DNA, 20 bp, Unknown
  Description of Unknown: gRNA target site sequence
acttttcaaagttcatttct

SEQ ID NO: 11833 - DNA, 20 bp, Unknown
  Description of Unknown: gRNA target site sequence
gttcatttctcagttcataa

SEQ ID NO: 11834 - DNA, 20 bp, Unknown
  Description of Unknown: gRNA target site sequence
tatgtttatgcctttctttt

SEQ ID NO: 11835 - DNA, 20 bp, Unknown
  Description of Unknown: gRNA target site sequence
ctgattttctaaactgtatg

SEQ ID NO: 11836 - DNA, 20 bp, Unknown
  Description of Unknown: gRNA target site sequence
tctaaactgtatgaagtgtc

SEQ ID NO: 11837 - DNA, 20 bp, Unknown
  Description of Unknown: gRNA target site sequence
aaactgtatgaagtgtctag

SEQ ID NO: 11838 - DNA, 20 bp, Unknown
  Description of Unknown: gRNA target site sequence
actgtatgaagtgtctagta

SEQ ID NO: 11839 - DNA, 20 bp, Unknown
  Description of Unknown: gRNA target site sequence
gaagtgtctagtagagtgcc

SEQ ID NO: 11840 - DNA, 20 bp, Unknown
  Description of Unknown: gRNA target site sequence
aagtgtctagtagagtgcct

SEQ ID NO: 11841 - DNA, 20 bp, Unknown
  Description of Unknown: gRNA target site sequence
ctagtagagtgcctgggaca

SEQ ID NO: 11842 - DNA, 20 bp, Unknown
  Description of Unknown: gRNA target site sequence
catagcaattgctctatacg

SEQ ID NO: 11843 - DNA, 20 bp, Unknown
  Description of Unknown: gRNA target site sequence
agcaattgctctatacgtgg

SEQ ID NO: 11844 - DNA, 20 bp, Unknown
  Description of Unknown: gRNA target site sequence
cgtggcagatgttattatct

SEQ ID NO: 11845 - DNA, 20 bp, Unknown
  Description of Unknown: gRNA target site sequence
gtggcagatgttattatctg

SEQ ID NO: 11846 - DNA, 20 bp, Unknown
  Description of Unknown: gRNA target site sequence
tgttattatctgaggttcct

SEQ ID NO: 11847 - DNA, 20 bp, Unknown
  Description of Unknown: gRNA target site sequence
tattatctgaggttcctaag

SEQ ID NO: 11848 - DNA, 20 bp, Unknown
  Description of Unknown: gRNA target site sequence
gttcctaagtggatcaaccc

SEQ ID NO: 11849 - DNA, 20 bp, Unknown
  Description of Unknown: gRNA target site sequence
ttcctaagtggatcaaccca

SEQ ID NO: 11850 - DNA, 20 bp, Unknown
  Description of Unknown: gRNA target site sequence
ttttttatttttttattttt

SEQ ID NO: 11851 - DNA, 20 bp, Unknown
  Description of Unknown: gRNA target site sequence
tttttatttttttatttttt

SEQ ID NO: 11852 - DNA, 20 bp, Unknown
  Description of Unknown: gRNA target site sequence
tatttttttattttttggga

SEQ ID NO: 11853 - DNA, 20 bp, Unknown
  Description of Unknown: gRNA target site sequence
tggaatctcattccattgcc

SEQ ID NO: 11854 - DNA, 20 bp, Unknown
  Description of Unknown: gRNA target site sequence
ggaatctcattccattgccc

SEQ ID NO: 11855 - DNA, 20 bp, Unknown
  Description of Unknown: gRNA target site sequence
tctcattccattgcccaggc

SEQ ID NO: 11856 - DNA, 20 bp, Unknown
  Description of Unknown: gRNA target site sequence
tcattccattgcccaggctg

SEQ ID NO: 11857 - DNA, 20 bp, Unknown
  Description of Unknown: gRNA target site sequence
ccattgcccaggctggagtg

SEQ ID NO: 11858 - DNA, 20 bp, Unknown
  Description of Unknown: gRNA target site sequence
ccaggctggagtgcagtgtg

SEQ ID NO: 11859 - DNA, 20 bp, Unknown
  Description of Unknown: gRNA target site sequence
ggctggagtgcagtgtgcag

SEQ ID NO: 11860 - DNA, 20 bp, Unknown
  Description of Unknown: gRNA target site sequence
ggagtgcagtgtgcagtggt

SEQ ID NO: 11861 - DNA, 20 bp, Unknown
  Description of Unknown: gRNA target site sequence
agtgtgcagtggtgagatct

SEQ ID NO: 11862 - DNA, 20 bp, Unknown
  Description of Unknown: gRNA target site sequence
tcactgcaacctccgcctcc

SEQ ID NO: 11863 - DNA, 20 bp, Unknown
  Description of Unknown: gRNA target site sequence
cactgcaacctccgcctcct

SEQ ID NO: 11864 - DNA, 20 bp, Unknown
  Description of Unknown: gRNA target site sequence
aacctccgcctcctgggttc

SEQ ID NO: 11865 - DNA, 20 bp, Unknown
  Description of Unknown: gRNA target site sequence
tcctgggttcaagtgattcc

SEQ ID NO: 11866 - DNA, 20 bp, Unknown
  Description of Unknown: gRNA target site sequence
cctgggttcaagtgattcct

SEQ ID NO: 11867 - DNA, 20 bp, Unknown
  Description of Unknown: gRNA target site sequence
tcaagtgattcctgggacta

SEQ ID NO: 11868 - DNA, 20 bp, Unknown
  Description of Unknown: gRNA target site sequence
caagtgattcctgggactac

SEQ ID NO: 11869 - DNA, 20 bp, Unknown
  Description of Unknown: gRNA target site sequence
caggcacacaccaccatgcc

SEQ ID NO: 11870 - DNA, 20 bp, Unknown
  Description of Unknown: gRNA target site sequence
ctggttaatttttgtatttt

SEQ ID NO: 11871 - DNA, 20 bp, Unknown
  Description of Unknown: gRNA target site sequence
gttaatttttgtattttcag

SEQ ID NO: 11872 - DNA, 20 bp, Unknown
  Description of Unknown: gRNA target site sequence
taatttttgtattttcagta

SEQ ID NO: 11873 - DNA, 20 bp, Unknown
  Description of Unknown: gRNA target site sequence
ttttgtattttcagtagaga

SEQ ID NO: 11874 - DNA, 20 bp, Unknown
  Description of Unknown: gRNA target site sequence
tttgtattttcagtagagac

SEQ ID NO: 11875 - DNA, 20 bp, Unknown
  Description of Unknown: gRNA target site sequence
gagacgggatttcaccatgt

SEQ ID NO: 11876 - DNA, 20 bp, Unknown
  Description of Unknown: gRNA target site sequence
cgggatttcaccatgttggc

SEQ ID NO: 11877 - DNA, 20 bp, Unknown
  Description of Unknown: gRNA target site sequence
gggatttcaccatgttggcc

SEQ ID NO: 11878 - DNA, 20 bp, Unknown
  Description of Unknown: gRNA target site sequence
tttcaccatgttggccaggc

SEQ ID NO: 11879 - DNA, 20 bp, Unknown
  Description of Unknown: gRNA target site sequence
ggtcttgaactcccaacttc

SEQ ID NO: 11880 - DNA, 20 bp, Unknown
  Description of Unknown: gRNA target site sequence
aactcccaacttcaagtgat

SEQ ID NO: 11881 - DNA, 20 bp, Unknown
  Description of Unknown: gRNA target site sequence
ttcaagtgatcagcctgcct

SEQ ID NO: 11882 - DNA, 20 bp, Unknown
  Description of Unknown: gRNA target site sequence
cagcctgccttggcctccca

SEQ ID NO: 11883 - DNA, 20 bp, Unknown
  Description of Unknown: gRNA target site sequence
gccttggcctcccaaagtgt

SEQ ID NO: 11884 - DNA, 20 bp, Unknown
  Description of Unknown: gRNA target site sequence
ccttggcctcccaaagtgtt

SEQ ID NO: 11885 - DNA, 20 bp, Unknown
  Description of Unknown: gRNA target site sequence
ctcccaaagtgttgggatta

SEQ ID NO: 11886 - DNA, 20 bp, Unknown
  Description of Unknown: gRNA target site sequence
tcccaaagtgttgggattac

SEQ ID NO: 11887 - DNA, 20 bp, Unknown
  Description of Unknown: gRNA target site sequence
agtgttgggattacaggcac

SEQ ID NO: 11888 - DNA, 20 bp, Unknown
  Description of Unknown: gRNA target site sequence
ccaccgtgcccaaccaaccc

SEQ ID NO: 11889 - DNA, 20 bp, Unknown
  Description of Unknown: gRNA target site sequence
caccgtgcccaaccaaccca

SEQ ID NO: 11890 - DNA, 20 bp, Unknown
  Description of Unknown: gRNA target site sequence
aaaacctctttatttctgct

SEQ ID NO: 11891 - DNA, 20 bp, Unknown
  Description of Unknown: gRNA target site sequence
aaacctctttatttctgctg

SEQ ID NO: 11892 - DNA, 20 bp, Unknown
  Description of Unknown: gRNA target site sequence
tctgctgaggttttatatgc

SEQ ID NO: 11893 - DNA, 20 bp, Unknown
  Description of Unknown: gRNA target site sequence
gactttgtacctaatttcat

SEQ ID NO: 11894 - DNA, 20 bp, Unknown
  Description of Unknown: gRNA target site sequence
atttcatgagctaaaaaaca

SEQ ID NO: 11895 - DNA, 20 bp, Unknown
  Description of Unknown: gRNA target site sequence
aacaaaacctaaatgcatac

SEQ ID NO: 11896 - DNA, 20 bp, Unknown
  Description of Unknown: gRNA target site sequence
caaaacctaaatgcatacaa

SEQ ID NO: 11897 - DNA, 20 bp, Unknown
  Description of Unknown: gRNA target site sequence
acctaaatgcatacaagagc

SEQ ID NO: 11898 - DNA, 20 bp, Unknown
  Description of Unknown: gRNA target site sequence
gagctggcaaataccttaaa

SEQ ID NO: 11899 - DNA, 20 bp, Unknown
  Description of Unknown: gRNA target site sequence
ggcaaataccttaaatggtt

SEQ ID NO: 11900 - DNA, 20 bp, Unknown
  Description of Unknown: gRNA target site sequence
aataccttaaatggttgagt

SEQ ID NO: 11901 - DNA, 20 bp, Unknown
  Description of Unknown: gRNA target site sequence
ttggacccgataaaatacaa

SEQ ID NO: 11902 - DNA, 20 bp, Unknown
  Description of Unknown: gRNA target site sequence
tggacccgataaaatacaac

SEQ ID NO: 11903 - DNA, 20 bp, Unknown
  Description of Unknown: gRNA target site sequence
ggacccgataaaatacaaca

SEQ ID NO: 11904 - DNA, 20 bp, Unknown
  Description of Unknown: gRNA target site sequence
ccgataaaatacaacaggga

SEQ ID NO: 11905 - DNA, 20 bp, Unknown
  Description of Unknown: gRNA target site sequence
cgataaaatacaacagggat

SEQ ID NO: 11906 - DNA, 20 bp, Unknown
  Description of Unknown: gRNA target site sequence
aaaatacaacagggataggt

SEQ ID NO: 11907 - DNA, 20 bp, Unknown
  Description of Unknown: gRNA target site sequence
aaatacaacagggataggtg

SEQ ID NO: 11908 - DNA, 20 bp, Unknown
  Description of Unknown: gRNA target site sequence
acagggataggtgaggacta

SEQ ID NO: 11909 - DNA, 20 bp, Unknown
  Description of Unknown: gRNA target site sequence
taggtgaggactatggcaaa

SEQ ID NO: 11910 - DNA, 20 bp, Unknown
  Description of Unknown: gRNA target site sequence
aggtgaggactatggcaaat

SEQ ID NO: 11911 - DNA, 20 bp, Unknown
  Description of Unknown: gRNA target site sequence
gaggactatggcaaatggga

SEQ ID NO: 11912 - DNA, 20 bp, Unknown
  Description of Unknown: gRNA target site sequence
tactttccattatgatcaaa

SEQ ID NO: 11913 - DNA, 20 bp, Unknown
  Description of Unknown: gRNA target site sequence
ctttccattatgatcaaatg

SEQ ID NO: 11914 - DNA, 20 bp, Unknown
  Description of Unknown: gRNA target site sequence
aaatggagtaatgcatgtga

SEQ ID NO: 11915 - DNA, 20 bp, Unknown
  Description of Unknown: gRNA target site sequence
tggagtaatgcatgtgacag

SEQ ID NO: 11916 - DNA, 20 bp, Unknown
  Description of Unknown: gRNA target site sequence
ggagtaatgcatgtgacagt

SEQ ID NO: 11917 - DNA, 20 bp, Unknown
  Description of Unknown: gRNA target site sequence
agtgggatttgcgttttaat

SEQ ID NO: 11918 - DNA, 20 bp, Unknown
  Description of Unknown: gRNA target site sequence
tgcgttttaattagcatcca

SEQ ID NO: 11919 - DNA, 20 bp, Unknown
  Description of Unknown: gRNA target site sequence
gcgttttaattagcatccac

SEQ ID NO: 11920 - DNA, 20 bp, Unknown
  Description of Unknown: gRNA target site sequence
cacaggtgattgctgtaaac

SEQ ID NO: 11921 - DNA, 20 bp, Unknown
  Description of Unknown: gRNA target site sequence
ggtgattgctgtaaactagc

SEQ ID NO: 11922 - DNA, 20 bp, Unknown
  Description of Unknown: gRNA target site sequence
gtgattgctgtaaactagcc

SEQ ID NO: 11923 - DNA, 20 bp, Unknown
  Description of Unknown: gRNA target site sequence
ttgctgtaaactagccaggt

SEQ ID NO: 11924 - DNA, 20 bp, Unknown
  Description of Unknown: gRNA target site sequence
tgctgtaaactagccaggtt

SEQ ID NO: 11925 - DNA, 20 bp, Unknown
  Description of Unknown: gRNA target site sequence
gaatatattgcctaatgttt

SEQ ID NO: 11926 - DNA, 20 bp, Unknown
  Description of Unknown: gRNA target site sequence
attgcctaatgtttcagaaa

SEQ ID NO: 11927 - DNA, 20 bp, Unknown
  Description of Unknown: gRNA target site sequence
gaaacagtactttccaaaat

SEQ ID NO: 11928 - DNA, 20 bp, Unknown
  Description of Unknown: gRNA target site sequence
aacagtactttccaaaatga

SEQ ID NO: 11929 - DNA, 20 bp, Unknown
  Description of Unknown: gRNA target site sequence
acagtactttccaaaatgag

SEQ ID NO: 11930 - DNA, 20 bp, Unknown
  Description of Unknown: gRNA target site sequence
tccaaaatgagaggcatgac

SEQ ID NO: 11931 - DNA, 20 bp, Unknown
  Description of Unknown: gRNA target site sequence
aggcatgactagaccatcca

SEQ ID NO: 11932 - DNA, 20 bp, Unknown
  Description of Unknown: gRNA target site sequence
ggcatgactagaccatccat

SEQ ID NO: 11933 - DNA, 20 bp, Unknown
  Description of Unknown: gRNA target site sequence
gcatgactagaccatccatg

SEQ ID NO: 11934 - DNA, 20 bp, Unknown
  Description of Unknown: gRNA target site sequence
tgactagaccatccatgggg

SEQ ID NO: 11935 - DNA, 20 bp, Unknown
  Description of Unknown: gRNA target site sequence
ctagaccatccatggggaag

SEQ ID NO: 11936 - DNA, 20 bp, Unknown
  Description of Unknown: gRNA target site sequence
tagaccatccatggggaagt

SEQ ID NO: 11937 - DNA, 20 bp, Unknown
  Description of Unknown: gRNA target site sequence
accatccatggggaagtggg

SEQ ID NO: 11938 - DNA, 20 bp, Unknown
  Description of Unknown: gRNA target site sequence
tatatttttcattgaaaatg

SEQ ID NO: 11939 - DNA, 20 bp, Unknown
  Description of Unknown: gRNA target site sequence
tatttttcattgaaaatgaa

SEQ ID NO: 11940 - DNA, 20 bp, Unknown
  Description of Unknown: gRNA target site sequence
ttttcattgaaaatgaagag

SEQ ID NO: 11941 - DNA, 20 bp, Unknown
  Description of Unknown: gRNA target site sequence
ttgaaaatgaagagaagtgt

SEQ ID NO: 11942 - DNA, 20 bp, Unknown
  Description of Unknown: gRNA target site sequence
tgttagtgctactaaatata

SEQ ID NO: 11943 - DNA, 20 bp, Unknown
  Description of Unknown: gRNA target site sequence
cttttaaatacacttatatt

SEQ ID NO: 11944 - DNA, 20 bp, Unknown
  Description of Unknown: gRNA target site sequence
ttttaaatacacttatattc

SEQ ID NO: 11945 - DNA, 20 bp, Unknown
  Description of Unknown: gRNA target site sequence
tttaaatacacttatattca

SEQ ID NO: 11946 - DNA, 20 bp, Unknown
  Description of Unknown: gRNA target site sequence
tcagggtacatgatcactaa

SEQ ID NO: 11947 - DNA, 20 bp, Unknown
  Description of Unknown: gRNA target site sequence
cagggtacatgatcactaaa

SEQ ID NO: 11948 - DNA, 20 bp, Unknown
  Description of Unknown: gRNA target site sequence
ggtacatgatcactaaaagg

SEQ ID NO: 11949 - DNA, 20 bp, Unknown
  Description of Unknown: gRNA target site sequence
ggcagctactcctccttgtc

SEQ ID NO: 11950 - DNA, 20 bp, Unknown
  Description of Unknown: gRNA target site sequence
gcagctactcctccttgtct

SEQ ID NO: 11951 - DNA, 20 bp, Unknown
  Description of Unknown: gRNA target site sequence
agctactcctccttgtctgg

SEQ ID NO: 11952 - DNA, 20 bp, Unknown
  Description of Unknown: gRNA target site sequence
gctactcctccttgtctggg

SEQ ID NO: 11953 - DNA, 20 bp, Unknown
  Description of Unknown: gRNA target site sequence
cctccttgtctgggaggctg

SEQ ID NO: 11954 - DNA, 20 bp, Unknown
  Description of Unknown: gRNA target site sequence
ctccttgtctgggaggctgt

SEQ ID NO: 11955 - DNA, 20 bp, Unknown
  Description of Unknown: gRNA target site sequence
tccttgtctgggaggctgtg

SEQ ID NO: 11956 - DNA, 20 bp, Unknown
  Description of Unknown: gRNA target site sequence
cttgtctgggaggctgtggg

SEQ ID NO: 11957 - DNA, 20 bp, Unknown
  Description of Unknown: gRNA target site sequence
gtctgggaggctgtggggag

SEQ ID NO: 11958 - DNA, 20 bp, Unknown
  Description of Unknown: gRNA target site sequence
tctgggaggctgtggggaga

SEQ ID NO: 11959 - DNA, 20 bp, Unknown
  Description of Unknown: gRNA target site sequence
tgggaggctgtggggagaag

SEQ ID NO: 11960 - DNA, 20 bp, Unknown
  Description of Unknown: gRNA target site sequence
gggaggctgtggggagaagg

SEQ ID NO: 11961 - DNA, 20 bp, Unknown
  Description of Unknown: gRNA target site sequence
gaggctgtggggagaaggag

SEQ ID NO: 11962 - DNA, 20 bp, Unknown
  Description of Unknown: gRNA target site sequence
gtggggagaaggaggagtac

SEQ ID NO: 11963 - DNA, 20 bp, Unknown
  Description of Unknown: gRNA target site sequence
tggggagaaggaggagtacc

SEQ ID NO: 11964 - DNA, 20 bp, Unknown
  Description of Unknown: gRNA target site sequence
gagtaccaggccaccttgac

SEQ ID NO: 11965 - DNA, 20 bp, Unknown
  Description of Unknown: gRNA target site sequence
cttgaccagatatatctctc

SEQ ID NO: 11966 - DNA, 20 bp, Unknown
  Description of Unknown: gRNA target site sequence
tctagaaacaccctatcatt

SEQ ID NO: 11967 - DNA, 20 bp, Unknown
  Description of Unknown: gRNA target site sequence
ctagaaacaccctatcatta

SEQ ID NO: 11968 - DNA, 20 bp, Unknown
  Description of Unknown: gRNA target site sequence
aaacaccctatcattaagga

SEQ ID NO: 11969 - DNA, 20 bp, Unknown
  Description of Unknown: gRNA target site sequence
aacaccctatcattaaggaa

SEQ ID NO: 11970 - DNA, 20 bp, Unknown
  Description of Unknown: gRNA target site sequence
tatcattaaggaaaggctac

SEQ ID NO: 11971 - DNA, 20 bp, Unknown
  Description of Unknown: gRNA target site sequence
gaaaggctactagccccatc

SEQ ID NO: 11972 - DNA, 20 bp, Unknown
  Description of Unknown: gRNA target site sequence
aaggctactagccccatcaa

SEQ ID NO: 11973 - DNA, 20 bp, Unknown
  Description of Unknown: gRNA target site sequence
aggctactagccccatcaag

SEQ ID NO: 11974 - DNA, 20 bp, Unknown
  Description of Unknown: gRNA target site sequence
ctactagccccatcaagagg

SEQ ID NO: 11975 - DNA, 20 bp, Unknown
  Description of Unknown: gRNA target site sequence
agccccatcaagaggtggat

SEQ ID NO: 11976 - DNA, 20 bp, Unknown
  Description of Unknown: gRNA target site sequence
gccccatcaagaggtggatt

SEQ ID NO: 11977 - DNA, 20 bp, Unknown
  Description of Unknown: gRNA target site sequence
ccccatcaagaggtggattg

SEQ ID NO: 11978 - DNA, 20 bp, Unknown
  Description of Unknown: gRNA target site sequence
gtggattggggaatctaatg

SEQ ID NO: 11979 - DNA, 20 bp, Unknown
  Description of Unknown: gRNA target site sequence
gatttttttcataacattaa

SEQ ID NO: 11980 - DNA, 20 bp, Unknown
  Description of Unknown: gRNA target site sequence
ttttcataacattaaaagct

SEQ ID NO: 11981 - DNA, 20 bp, Unknown
  Description of Unknown: gRNA target site sequence
ttcataacattaaaagctaa

SEQ ID NO: 11982 - DNA, 20 bp, Unknown
  Description of Unknown: gRNA target site sequence
cataacattaaaagctaaga

SEQ ID NO: 11983 - DNA, 20 bp, Unknown
  Description of Unknown: gRNA target site sequence
taagagagctctttgcatct

SEQ ID NO: 11984 - DNA, 20 bp, Unknown
  Description of Unknown: gRNA target site sequence
gcatctgagcttctaataat

SEQ ID NO: 11985 - DNA, 20 bp, Unknown
  Description of Unknown: gRNA target site sequence
taagaacatattaaatgcct

SEQ ID NO: 11986 - DNA, 20 bp, Unknown
  Description of Unknown: gRNA target site sequence
aagaacatattaaatgcctc

SEQ ID NO: 11987 - DNA, 20 bp, Unknown
  Description of Unknown: gRNA target site sequence
agaacatattaaatgcctca

SEQ ID NO: 11988 - DNA, 20 bp, Unknown
  Description of Unknown: gRNA target site sequence
atattaaatgcctcagggat

SEQ ID NO: 11989 - DNA, 20 bp, Unknown
  Description of Unknown: gRNA target site sequence
attaaatgcctcagggatca

SEQ ID NO: 11990 - DNA, 20 bp, Unknown
  Description of Unknown: gRNA target site sequence
atgcctcagggatcagagca

SEQ ID NO: 11991 - DNA, 20 bp, Unknown
  Description of Unknown: gRNA target site sequence
gagcacagattcatcctgcc

SEQ ID NO: 11992 - DNA, 20 bp, Unknown
  Description of Unknown: gRNA target site sequence
ctgcctggaactctctgttt

SEQ ID NO: 11993 - DNA, 20 bp, Unknown
  Description of Unknown: gRNA target site sequence
tgcctggaactctctgtttg

SEQ ID NO: 11994 - DNA, 20 bp, Unknown
  Description of Unknown: gRNA target site sequence
gcctggaactctctgtttga

SEQ ID NO: 11995 - DNA, 20 bp, Unknown
  Description of Unknown: gRNA target site sequence
tggaactctctgtttgaggg

SEQ ID NO: 11996 - DNA, 20 bp, Unknown
  Description of Unknown: gRNA target site sequence
ggaactctctgtttgaggga

SEQ ID NO: 11997 - DNA, 20 bp, Unknown
  Description of Unknown: gRNA target site sequence
actctctgtttgagggaagg

SEQ ID NO: 11998 - DNA, 20 bp, Unknown
  Description of Unknown: gRNA target site sequence
tctgtttgagggaaggcggc

SEQ ID NO: 11999 - DNA, 20 bp, Unknown
  Description of Unknown: gRNA target site sequence
ggaaggcggcaagattttgt

SEQ ID NO: 12000 - DNA, 20 bp, Unknown
  Description of Unknown: gRNA target site sequence
aaggcggcaagattttgtga

SEQ ID NO: 12001 - DNA, 20 bp, Unknown
  Description of Unknown: gRNA target site sequence
gcatcactgtaatcttttct

SEQ ID NO: 12002 - DNA, 20 bp, Unknown
  Description of Unknown: gRNA target site sequence
tcactgtaatcttttctaag

SEQ ID NO: 12003 - DNA, 20 bp, Unknown
  Description of Unknown: gRNA target site sequence
actgtaatcttttctaagaa

SEQ ID NO: 12004 - DNA, 20 bp, Unknown
  Description of Unknown: gRNA target site sequence
ctgtaatcttttctaagaag

SEQ ID NO: 12005 - DNA, 20 bp, Unknown
  Description of Unknown: gRNA target site sequence
atcttttctaagaagaggac

SEQ ID NO: 12006 - DNA, 20 bp, Unknown
  Description of Unknown: gRNA target site sequence
tctaagaagaggacaagtat

SEQ ID NO: 12007 - DNA, 20 bp, Unknown
  Description of Unknown: gRNA target site sequence
agaagaggacaagtatcaga

SEQ ID NO: 12008 - DNA, 20 bp, Unknown
  Description of Unknown: gRNA target site sequence
gaagaggacaagtatcagac

SEQ ID NO: 12009 - DNA, 20 bp, Unknown
  Description of Unknown: gRNA target site sequence
aggacaagtatcagacaggc

SEQ ID NO: 12010 - DNA, 20 bp, Unknown
  Description of Unknown: gRNA target site sequence
ggacaagtatcagacaggct

SEQ ID NO: 12011 - DNA, 20 bp, Unknown
  Description of Unknown: gRNA target site sequence
agacaggctgggtttgaatt

SEQ ID NO: 12012 - DNA, 20 bp, Unknown
  Description of Unknown: gRNA target site sequence
gacaggctgggtttgaattt

SEQ ID NO: 12013 - DNA, 20 bp, Unknown
  Description of Unknown: gRNA target site sequence
ggtttgaatttgggctcaac

SEQ ID NO: 12014 - DNA, 20 bp, Unknown
  Description of Unknown: gRNA target site sequence
atttgggctcaaccagttac

SEQ ID NO: 12015 - DNA, 20 bp, Unknown
  Description of Unknown: gRNA target site sequence
gttactggctttatgacttt

SEQ ID NO: 12016 - DNA, 20 bp, Unknown
  Description of Unknown: gRNA target site sequence
tactggctttatgacttttg

SEQ ID NO: 12017 - DNA, 20 bp, Unknown
  Description of Unknown: gRNA target site sequence
ctggctttatgacttttgga

SEQ ID NO: 12018 - DNA, 20 bp, Unknown
  Description of Unknown: gRNA target site sequence
tgacttttggagagttattt

SEQ ID NO: 12019 - DNA, 20 bp, Unknown
  Description of Unknown: gRNA target site sequence
gaaaaattaatttatgccca

SEQ ID NO: 12020 - DNA, 20 bp, Unknown
  Description of Unknown: gRNA target site sequence
acaaaaacaaaacccacaca

SEQ ID NO: 12021 - DNA, 20 bp, Unknown
  Description of Unknown: gRNA target site sequence
caaaaacaaaacccacacac

SEQ ID NO: 12022 - DNA, 20 bp, Unknown
  Description of Unknown: gRNA target site sequence
aacaaaacccacacacaggt

SEQ ID NO: 12023 - DNA, 20 bp, Unknown
  Description of Unknown: gRNA target site sequence
caaaacccacacacaggtca

SEQ ID NO: 12024 - DNA, 20 bp, Unknown
  Description of Unknown: gRNA target site sequence
aaaacccacacacaggtcag

SEQ ID NO: 12025 - DNA, 20 bp, Unknown
  Description of Unknown: gRNA target site sequence
aacccacacacaggtcagag

SEQ ID NO: 12026 - DNA, 20 bp, Unknown
  Description of Unknown: gRNA target site sequence
acccacacacaggtcagagg

SEQ ID NO: 12027 - DNA, 20 bp, Unknown
  Description of Unknown: gRNA target site sequence
cacaggtcagaggaggaaaa

SEQ ID NO: 12028 - DNA, 20 bp, Unknown
  Description of Unknown: gRNA target site sequence
agaggaggaaaatagacctt

SEQ ID NO: 12029 - DNA, 20 bp, Unknown
  Description of Unknown: gRNA target site sequence
aggaggaaaatagaccttca

SEQ ID NO: 12030 - DNA, 20 bp, Unknown
  Description of Unknown: gRNA target site sequence
ggaggaaaatagaccttcag

SEQ ID NO: 12031 - DNA, 20 bp, Unknown
  Description of Unknown: gRNA target site sequence
tcatcattacatgtttcttg

SEQ ID NO: 12032 - DNA, 20 bp, Unknown
  Description of Unknown: gRNA target site sequence
atgtttcttgtggtatcttc

SEQ ID NO: 12033 - DNA, 20 bp, Unknown
  Description of Unknown: gRNA target site sequence
cttgtggtatcttccagaaa

SEQ ID NO: 12034 - DNA, 20 bp, Unknown
  Description of Unknown: gRNA target site sequence
ttccagaaatggtctatgca

SEQ ID NO: 12035 - DNA, 20 bp, Unknown
  Description of Unknown: gRNA target site sequence
atgcatggcatgtattactt

SEQ ID NO: 12036 - DNA, 20 bp, Unknown
  Description of Unknown: gRNA target site sequence
actttggaaattttcaaaat

SEQ ID NO: 12037 - DNA, 20 bp, Unknown
  Description of Unknown: gRNA target site sequence
taagatttttttttaaatat

SEQ ID NO: 12038 - DNA, 20 bp, Unknown
  Description of Unknown: gRNA target site sequence
aaaatgacatctaacataac

SEQ ID NO: 12039 - DNA, 20 bp, Unknown
  Description of Unknown: gRNA target site sequence
ctaacataaccagcaaatac

SEQ ID NO: 12040 - DNA, 20 bp, Unknown
  Description of Unknown: gRNA target site sequence
taaccagcaaataccagtaa

SEQ ID NO: 12041 - DNA, 20 bp, Unknown
  Description of Unknown: gRNA target site sequence
ccagcaaataccagtaatgg

SEQ ID NO: 12042 - DNA, 20 bp, Unknown
  Description of Unknown: gRNA target site sequence
tgctttcgatcatgttttgc

SEQ ID NO: 12043 - DNA, 20 bp, Unknown
  Description of Unknown: gRNA target site sequence
ctttcgatcatgttttgcca

SEQ ID NO: 12044 - DNA, 20 bp, Unknown
  Description of Unknown: gRNA target site sequence
tttcgatcatgttttgccag

SEQ ID NO: 12045 - DNA, 20 bp, Unknown
  Description of Unknown: gRNA target site sequence
atcatgttttgccagaggaa

SEQ ID NO: 12046 - DNA, 20 bp, Unknown
  Description of Unknown: gRNA target site sequence
tcatgttttgccagaggaaa

SEQ ID NO: 12047 - DNA, 20 bp, Unknown
  Description of Unknown: gRNA target site sequence
gttttgccagaggaaaaggt

SEQ ID NO: 12048 - DNA, 20 bp, Unknown
  Description of Unknown: gRNA target site sequence
gaggaaaaggtgagcgcgct

SEQ ID NO: 12049 - DNA, 20 bp, Unknown
  Description of Unknown: gRNA target site sequence
gagcgcgcttagtgtattgc

SEQ ID NO: 12050 - DNA, 20 bp, Unknown
  Description of Unknown: gRNA target site sequence
agcgcgcttagtgtattgcc

SEQ ID NO: 12051 - DNA, 20 bp, Unknown
  Description of Unknown: gRNA target site sequence
ttagtgtattgccaggtact

SEQ ID NO: 12052 - DNA, 20 bp, Unknown
  Description of Unknown: gRNA target site sequence
tgtattgccaggtacttaga

SEQ ID NO: 12053 - DNA, 20 bp, Unknown
  Description of Unknown: gRNA target site sequence
caggtacttagaaagtgctc

SEQ ID NO: 12054 - DNA, 20 bp, Unknown
  Description of Unknown: gRNA target site sequence
tagaaagtgctcaagatctc

SEQ ID NO: 12055 - DNA, 20 bp, Unknown
  Description of Unknown: gRNA target site sequence
aagatctctggcgtcctcaa

SEQ ID NO: 12056 - DNA, 20 bp, Unknown
  Description of Unknown: gRNA target site sequence
tctggcgtcctcaacagtct

SEQ ID NO: 12057 - DNA, 20 bp, Unknown
  Description of Unknown: gRNA target site sequence
aacagtcttggtaaccatct

SEQ ID NO: 12058 - DNA, 20 bp, Unknown
  Description of Unknown: gRNA target site sequence
tcttggattatctttattaa

SEQ ID NO: 12059 - DNA, 20 bp, Unknown
  Description of Unknown: gRNA target site sequence
tatctttattaatggtttta

SEQ ID NO: 12060 - DNA, 20 bp, Unknown
  Description of Unknown: gRNA target site sequence
tttttttttttttctttttt

SEQ ID NO: 12061 - DNA, 20 bp, Unknown
  Description of Unknown: gRNA target site sequence
tttttttttttcttttttga

SEQ ID NO: 12062 - DNA, 20 bp, Unknown
  Description of Unknown: gRNA target site sequence
tttttttcttttttgagaga

SEQ ID NO: 12063 - DNA, 20 bp, Unknown
  Description of Unknown: gRNA target site sequence
ttttttcttttttgagagac

SEQ ID NO: 12064 - DNA, 20 bp, Unknown
  Description of Unknown: gRNA target site sequence
tttttcttttttgagagaca

SEQ ID NO: 12065 - DNA, 20 bp, Unknown
  Description of Unknown: gRNA target site sequence
tctcgctctgttgcccacgc

SEQ ID NO: 12066 - DNA, 20 bp, Unknown
  Description of Unknown: gRNA target site sequence
tcgctctgttgcccacgctg

SEQ ID NO: 12067 - DNA, 20 bp, Unknown
  Description of Unknown: gRNA target site sequence
ttgcccacgctggagtgcac

SEQ ID NO: 12068 - DNA, 20 bp, Unknown
  Description of Unknown: gRNA target site sequence
ggagtgcactggcgccatga

SEQ ID NO: 12069 - DNA, 20 bp, Unknown
  Description of Unknown: gRNA target site sequence
ctggcgccatgatagctcaa

SEQ ID NO: 12070 - DNA, 20 bp, Unknown
  Description of Unknown: gRNA target site sequence
ccatgatagctcaaaagcct

SEQ ID NO: 12071 - DNA, 20 bp, Unknown
  Description of Unknown: gRNA target site sequence
tagctcaaaagcctaagctc

SEQ ID NO: 12072 - DNA, 20 bp, Unknown
  Description of Unknown: gRNA target site sequence
gctcaaaagcctaagctcaa

SEQ ID NO: 12073 - DNA, 20 bp, Unknown
  Description of Unknown: gRNA target site sequence
ctcaagagatcctcccgcct

SEQ ID NO: 12074 - DNA, 20 bp, Unknown
  Description of Unknown: gRNA target site sequence
gatcctcccgcctcagccac

SEQ ID NO: 12075 - DNA, 20 bp, Unknown
  Description of Unknown: gRNA target site sequence
tcctcccgcctcagccaccg

SEQ ID NO: 12076 - DNA, 20 bp, Unknown
  Description of Unknown: gRNA target site sequence
tcccgcctcagccaccggag

SEQ ID NO: 12077 - DNA, 20 bp, Unknown
  Description of Unknown: gRNA target site sequence
gcctcagccaccggagcagc

SEQ ID NO: 12078 - DNA, 20 bp, Unknown
  Description of Unknown: gRNA target site sequence
cctcagccaccggagcagct

SEQ ID NO: 12079 - DNA, 20 bp, Unknown
  Description of Unknown: gRNA target site sequence
caccggagcagctgggacca

SEQ ID NO: 12080 - DNA, 20 bp, Unknown
  Description of Unknown: gRNA target site sequence
accggagcagctgggaccac

SEQ ID NO: 12081 - DNA, 20 bp, Unknown
  Description of Unknown: gRNA target site sequence
gcagctgggaccacaggcac

SEQ ID NO: 12082 - DNA, 20 bp, Unknown
  Description of Unknown: gRNA target site sequence
caggcacgagccaccacacc

SEQ ID NO: 12083 - DNA, 20 bp, Unknown
  Description of Unknown: gRNA target site sequence
atttttgttattattttttg

SEQ ID NO: 12084 - DNA, 20 bp, Unknown
  Description of Unknown: gRNA target site sequence
ttttgttattattttttgta

SEQ ID NO: 12085 - DNA, 20 bp, Unknown
  Description of Unknown: gRNA target site sequence
ttattattttttgtagagac

SEQ ID NO: 12086 - DNA, 20 bp, Unknown
  Description of Unknown: gRNA target site sequence
tattattttttgtagagacc

SEQ ID NO: 12087 - DNA, 20 bp, Unknown
  Description of Unknown: gRNA target site sequence
gagaccaggcttcaccatgt

SEQ ID NO: 12088 - DNA, 20 bp, Unknown
  Description of Unknown: gRNA target site sequence
ccaggcttcaccatgttggc

SEQ ID NO: 12089 - DNA, 20 bp, Unknown
  Description of Unknown: gRNA target site sequence
caggcttcaccatgttggcc

SEQ ID NO: 12090 - DNA, 20 bp, Unknown
  Description of Unknown: gRNA target site sequence
cttcaccatgttggccaggc

SEQ ID NO: 12091 - DNA, 20 bp, Unknown
  Description of Unknown: gRNA target site sequence
ggccaggctggtctcaacta

SEQ ID NO: 12092 - DNA, 20 bp, Unknown
  Description of Unknown: gRNA target site sequence
tggtctcaactacggacctc

SEQ ID NO: 12093 - DNA, 20 bp, Unknown
  Description of Unknown: gRNA target site sequence
ctcaagccatcctcccgcct

SEQ ID NO: 12094 - DNA, 20 bp, Unknown
  Description of Unknown: gRNA target site sequence
cctcccgcctcggcctccct

SEQ ID NO: 12095 - DNA, 20 bp, Unknown
  Description of Unknown: gRNA target site sequence
gcctcggcctccctaagtgc

SEQ ID NO: 12096 - DNA, 20 bp, Unknown
  Description of Unknown: gRNA target site sequence
cctcggcctccctaagtgct

SEQ ID NO: 12097 - DNA, 20 bp, Unknown
  Description of Unknown: gRNA target site sequence
ctccctaagtgctgggatta

SEQ ID NO: 12098 - DNA, 20 bp, Unknown
  Description of Unknown: gRNA target site sequence
tccctaagtgctgggattac

SEQ ID NO: 12099 - DNA, 20 bp, Unknown
  Description of Unknown: gRNA target site sequence
agtgctgggattacaggcgt

SEQ ID NO: 12100 - DNA, 20 bp, Unknown
  Description of Unknown: gRNA target site sequence
cctcatgttttcaaaaccga

SEQ ID NO: 12101 - DNA, 20 bp, Unknown
  Description of Unknown: gRNA target site sequence
atgttttcaaaaccgaaagt

SEQ ID NO: 12102 - DNA, 20 bp, Unknown
  Description of Unknown: gRNA target site sequence
gttttcaaaaccgaaagtaa

SEQ ID NO: 12103 - DNA, 20 bp, Unknown
  Description of Unknown: gRNA target site sequence
ttttcaaaaccgaaagtaag

SEQ ID NO: 12104 - DNA, 20 bp, Unknown
  Description of Unknown: gRNA target site sequence
aaaaccgaaagtaagaggca

SEQ ID NO: 12105 - DNA, 20 bp, Unknown
  Description of Unknown: gRNA target site sequence
gtaagaggcacagtacatct

SEQ ID NO: 12106 - DNA, 20 bp, Unknown
  Description of Unknown: gRNA target site sequence
cagtacatcttggaaacaac

SEQ ID NO: 12107 - DNA, 20 bp, Unknown
  Description of Unknown: gRNA target site sequence
agtacatcttggaaacaacc

SEQ ID NO: 12108 - DNA, 20 bp, Unknown
  Description of Unknown: gRNA target site sequence
atcttggaaacaaccaggca

SEQ ID NO: 12109 - DNA, 20 bp, Unknown
  Description of Unknown: gRNA target site sequence
cttggaaacaaccaggcaaa

SEQ ID NO: 12110 - DNA, 20 bp, Unknown
  Description of Unknown: gRNA target site sequence
aacaaccaggcaaagagcca

SEQ ID NO: 12111 - DNA, 20 bp, Unknown
  Description of Unknown: gRNA target site sequence
caaccaggcaaagagccaaa

SEQ ID NO: 12112 - DNA, 20 bp, Unknown
  Description of Unknown: gRNA target site sequence
aaccaggcaaagagccaaag

SEQ ID NO: 12113 - DNA, 20 bp, Unknown
  Description of Unknown: gRNA target site sequence
caggcaaagagccaaagagg

SEQ ID NO: 12114 - DNA, 20 bp, Unknown
  Description of Unknown: gRNA target site sequence
gaggaagccctctgtacgaa

SEQ ID NO: 12115 - DNA, 20 bp, Unknown
  Description of Unknown: gRNA target site sequence
ccctctgtacgaaaagacca

SEQ ID NO: 12116 - DNA, 20 bp, Unknown
  Description of Unknown: gRNA target site sequence
cctctgtacgaaaagaccac

SEQ ID NO: 12117 - DNA, 20 bp, Unknown
  Description of Unknown: gRNA target site sequence
ctctgtacgaaaagaccaca

SEQ ID NO: 12118 - DNA, 20 bp, Unknown
  Description of Unknown: gRNA target site sequence
accacagggcccatgccgcc

SEQ ID NO: 12119 - DNA, 20 bp, Unknown
  Description of Unknown: gRNA target site sequence
ccatgccgcccagtttgctc

SEQ ID NO: 12120 - DNA, 20 bp, Unknown
  Description of Unknown: gRNA target site sequence
atgccgcccagtttgctctg

SEQ ID NO: 12121 - DNA, 20 bp, Unknown
  Description of Unknown: gRNA target site sequence
ttgctctggagaatctcacg

SEQ ID NO: 12122 - DNA, 20 bp, Unknown
  Description of Unknown: gRNA target site sequence
ctctggagaatctcacgcag

SEQ ID NO: 12123 - DNA, 20 bp, Unknown
  Description of Unknown: gRNA target site sequence
tctggagaatctcacgcaga

SEQ ID NO: 12124 - DNA, 20 bp, Unknown
  Description of Unknown: gRNA target site sequence
ggagaatctcacgcagaagg

SEQ ID NO: 12125 - DNA, 20 bp, Unknown
  Description of Unknown: gRNA target site sequence
gagaatctcacgcagaaggc

SEQ ID NO: 12126 - DNA, 20 bp, Unknown
  Description of Unknown: gRNA target site sequence
aaaaaaaaatgcacgaatta

SEQ ID NO: 12127 - DNA, 20 bp, Unknown
  Description of Unknown: gRNA target site sequence
aatgcacgaattacagccaa

SEQ ID NO: 12128 - DNA, 20 bp, Unknown
  Description of Unknown: gRNA target site sequence
atgcacgaattacagccaaa

SEQ ID NO: 12129 - DNA, 20 bp, Unknown
  Description of Unknown: gRNA target site sequence
aaaggcatgcgctcccgcaa

SEQ ID NO: 12130 - DNA, 20 bp, Unknown
  Description of Unknown: gRNA target site sequence
atgcgctcccgcaaaagccc

SEQ ID NO: 12131 - DNA, 20 bp, Unknown
  Description of Unknown: gRNA target site sequence
gctcccgcaaaagccctggt

SEQ ID NO: 12132 - DNA, 20 bp, Unknown
  Description of Unknown: gRNA target site sequence
ctcccgcaaaagccctggtt

SEQ ID NO: 12133 - DNA, 20 bp, Unknown
  Description of Unknown: gRNA target site sequence
catttatcccctgtgtaatt

SEQ ID NO: 12134 - DNA, 20 bp, Unknown
  Description of Unknown: gRNA target site sequence
aattaagtttcttaaaatct

SEQ ID NO: 12135 - DNA, 20 bp, Unknown
  Description of Unknown: gRNA target site sequence
ttcttaaaatctcggtgcct

SEQ ID NO: 12136 - DNA, 20 bp, Unknown
  Description of Unknown: gRNA target site sequence
gccttagtttcttcatctgt

SEQ ID NO: 12137 - DNA, 20 bp, Unknown
  Description of Unknown: gRNA target site sequence
cttagtttcttcatctgtga

SEQ ID NO: 12138 - DNA, 20 bp, Unknown
  Description of Unknown: gRNA target site sequence
ttagtttcttcatctgtgag

SEQ ID NO: 12139 - DNA, 20 bp, Unknown
  Description of Unknown: gRNA target site sequence
gtttcttcatctgtgagagg

SEQ ID NO: 12140 - DNA, 20 bp, Unknown
  Description of Unknown: gRNA target site sequence
tcttcatctgtgagaggcag

SEQ ID NO: 12141 - DNA, 20 bp, Unknown
  Description of Unknown: gRNA target site sequence
tgagaggcagaagataacca

SEQ ID NO: 12142 - DNA, 20 bp, Unknown
  Description of Unknown: gRNA target site sequence
gaggcagaagataaccatag

SEQ ID NO: 12143 - DNA, 20 bp, Unknown
  Description of Unknown: gRNA target site sequence
ataaccatagtagttatcta

SEQ ID NO: 12144 - DNA, 20 bp, Unknown
  Description of Unknown: gRNA target site sequence
accatagtagttatctatgg

SEQ ID NO: 12145 - DNA, 20 bp, Unknown
  Description of Unknown: gRNA target site sequence
atagtagttatctatggcgg

SEQ ID NO: 12146 - DNA, 20 bp, Unknown
  Description of Unknown: gRNA target site sequence
tttcaaaattaaatgacgca

SEQ ID NO: 12147 - DNA, 20 bp, Unknown
  Description of Unknown: gRNA target site sequence
taaatgacgcaaagcacata

SEQ ID NO: 12148 - DNA, 20 bp, Unknown
  Description of Unknown: gRNA target site sequence
cgcaaagcacataaagtcct

SEQ ID NO: 12149 - DNA, 20 bp, Unknown
  Description of Unknown: gRNA target site sequence
cacataaagtccttggcaca

SEQ ID NO: 12150 - DNA, 20 bp, Unknown
  Description of Unknown: gRNA target site sequence
taaagtccttggcacacaga

SEQ ID NO: 12151 - DNA, 20 bp, Unknown
  Description of Unknown: gRNA target site sequence
acacagaaagatgtcaataa

SEQ ID NO: 12152 - DNA, 20 bp, Unknown
  Description of Unknown: gRNA target site sequence
cacagaaagatgtcaataac

SEQ ID NO: 12153 - DNA, 20 bp, Unknown
  Description of Unknown: gRNA target site sequence
agaaagatgtcaataacggg

SEQ ID NO: 12154 - DNA, 20 bp, Unknown
  Description of Unknown: gRNA target site sequence
tagttcttataattttttaa

SEQ ID NO: 12155 - DNA, 20 bp, Unknown
  Description of Unknown: gRNA target site sequence
tttttaaaagtgacatgtga

SEQ ID NO: 12156 - DNA, 20 bp, Unknown
  Description of Unknown: gRNA target site sequence
ttttaaaagtgacatgtgat

SEQ ID NO: 12157 - DNA, 20 bp, Unknown
  Description of Unknown: gRNA target site sequence
gacatgtgatgggaacaaat

SEQ ID NO: 12158 - DNA, 20 bp, Unknown
  Description of Unknown: gRNA target site sequence
ttcgaaaccgctttgtatca

SEQ ID NO: 12159 - DNA, 20 bp, Unknown
  Description of Unknown: gRNA target site sequence
aaccgctttgtatcacagcc

SEQ ID NO: 12160 - DNA, 20 bp, Unknown
  Description of Unknown: gRNA target site sequence
cgcgtgctgtttcctcccca

SEQ ID NO: 12161 - DNA, 20 bp, Unknown
  Description of Unknown: gRNA target site sequence
gctgtttcctccccacggtg

SEQ ID NO: 12162 - DNA, 20 bp, Unknown
  Description of Unknown: gRNA target site sequence
ccccacggtgtggccccaca

SEQ ID NO: 12163 - DNA, 20 bp, Unknown
  Description of Unknown: gRNA target site sequence
ggtgtggccccacatagacc

SEQ ID NO: 12164 - DNA, 20 bp, Unknown
  Description of Unknown: gRNA target site sequence
tgtggccccacatagaccca

SEQ ID NO: 12165 - DNA, 20 bp, Unknown
  Description of Unknown: gRNA target site sequence
gtggccccacatagacccag

SEQ ID NO: 12166 - DNA, 20 bp, Unknown
  Description of Unknown: gRNA target site sequence
ccacatagacccagaggtgc

SEQ ID NO: 12167 - DNA, 20 bp, Unknown
  Description of Unknown: gRNA target site sequence
cacatagacccagaggtgct

SEQ ID NO: 12168 - DNA, 20 bp, Unknown
  Description of Unknown: gRNA target site sequence
ggtgctaggacatgcgaact

SEQ ID NO: 12169 - DNA, 20 bp, Unknown
  Description of Unknown: gRNA target site sequence
gctaggacatgcgaacttag

SEQ ID NO: 12170 - DNA, 20 bp, Unknown
  Description of Unknown: gRNA target site sequence
ctaggacatgcgaacttagc

SEQ ID NO: 12171 - DNA, 20 bp, Unknown
  Description of Unknown: gRNA target site sequence
atgcgaacttagcgggcgcc

SEQ ID NO: 12172 - DNA, 20 bp, Unknown
  Description of Unknown: gRNA target site sequence
acttagcgggcgcctagacg

SEQ ID NO: 12173 - DNA, 20 bp, Unknown
  Description of Unknown: gRNA target site sequence
gggcgcctagacgaagtcca

SEQ ID NO: 12174 - DNA, 20 bp, Unknown
  Description of Unknown: gRNA target site sequence
agacgaagtccacagctctc

SEQ ID NO: 12175 - DNA, 20 bp, Unknown
  Description of Unknown: gRNA target site sequence
agtccacagctctccagtct

SEQ ID NO: 12176 - DNA, 20 bp, Unknown
  Description of Unknown: gRNA target site sequence
gtccacagctctccagtcta

SEQ ID NO: 12177 - DNA, 20 bp, Unknown
  Description of Unknown: gRNA target site sequence
tccacagctctccagtctaa

SEQ ID NO: 12178 - DNA, 20 bp, Unknown
  Description of Unknown: gRNA target site sequence
acagctctccagtctaaggg

SEQ ID NO: 12179 - DNA, 20 bp, Unknown
  Description of Unknown: gRNA target site sequence
gctctccagtctaagggaag

SEQ ID NO: 12180 - DNA, 20 bp, Unknown
  Description of Unknown: gRNA target site sequence
tctccagtctaagggaagca

SEQ ID NO: 12181 - DNA, 20 bp, Unknown
  Description of Unknown: gRNA target site sequence
gtctaagggaagcagagccg

SEQ ID NO: 12182 - DNA, 20 bp, Unknown
  Description of Unknown: gRNA target site sequence
taagggaagcagagccgcag

SEQ ID NO: 12183 - DNA, 20 bp, Unknown
  Description of Unknown: gRNA target site sequence
ggaagcagagccgcagcaga

SEQ ID NO: 12184 - DNA, 20 bp, Unknown
  Description of Unknown: gRNA target site sequence
gaagcagagccgcagcagac

SEQ ID NO: 12185 - DNA, 20 bp, Unknown
  Description of Unknown: gRNA target site sequence
ccgcagcagacaggcttacc

SEQ ID NO: 12186 - DNA, 20 bp, Unknown
  Description of Unknown: gRNA target site sequence
cgcagcagacaggcttaccc

SEQ ID NO: 12187 - DNA, 20 bp, Unknown
  Description of Unknown: gRNA target site sequence
tacccgggcgacgcctcccc

SEQ ID NO: 12188 - DNA, 20 bp, Unknown
  Description of Unknown: gRNA target site sequence
cgacgcctcccccagacccc

SEQ ID NO: 12189 - DNA, 20 bp, Unknown
  Description of Unknown: gRNA target site sequence
ctccacgcgttcacaaacct

SEQ ID NO: 12190 - DNA, 20 bp, Unknown
  Description of Unknown: gRNA target site sequence
aaacctcagcgccgcgcctt

SEQ ID NO: 12191 - DNA, 20 bp, Unknown
  Description of Unknown: gRNA target site sequence
aacctcagcgccgcgccttt

SEQ ID NO: 12192 - DNA, 20 bp, Unknown
  Description of Unknown: gRNA target site sequence
cagcgccgcgcctttgggac

SEQ ID NO: 12193 - DNA, 20 bp, Unknown
  Description of Unknown: gRNA target site sequence
agcctacccgtcccccactc

SEQ ID NO: 12194 - DNA, 20 bp, Unknown
  Description of Unknown: gRNA target site sequence
gtcccccactccagctgcgc

SEQ ID NO: 12195 - DNA, 20 bp, Unknown
  Description of Unknown: gRNA target site sequence
tcccccactccagctgcgct

SEQ ID NO: 12196 - DNA, 20 bp, Unknown
  Description of Unknown: gRNA target site sequence
cccccactccagctgcgctg

SEQ ID NO: 12197 - DNA, 20 bp, Unknown
  Description of Unknown: gRNA target site sequence
ccccactccagctgcgctgg

SEQ ID NO: 12198 - DNA, 20 bp, Unknown
  Description of Unknown: gRNA target site sequence
ccactccagctgcgctgggg

SEQ ID NO: 12199 - DNA, 20 bp, Unknown
  Description of Unknown: gRNA target site sequence
tccagctgcgctgggggagc

SEQ ID NO: 12200 - DNA, 20 bp, Unknown
  Description of Unknown: gRNA target site sequence
cagctgcgctgggggagcca

SEQ ID NO: 12201 - DNA, 20 bp, Unknown
  Description of Unknown: gRNA target site sequence
agctgcgctgggggagccag

SEQ ID NO: 12202 - DNA, 20 bp, Unknown
  Description of Unknown: gRNA target site sequence
gggagccagaggccccgcga

SEQ ID NO: 12203 - DNA, 20 bp, Unknown
  Description of Unknown: gRNA target site sequence
gagccagaggccccgcgaaa

SEQ ID NO: 12204 - DNA, 20 bp, Unknown
  Description of Unknown: gRNA target site sequence
ccagaggccccgcgaaagag

SEQ ID NO: 12205 - DNA, 20 bp, Unknown
  Description of Unknown: gRNA target site sequence
gaggccccgcgaaagagcgg

SEQ ID NO: 12206 - DNA, 20 bp, Unknown
  Description of Unknown: gRNA target site sequence
ggccccgcgaaagagcggaa

SEQ ID NO: 12207 - DNA, 20 bp, Unknown
  Description of Unknown: gRNA target site sequence
gagaaaccctcccccaacct

SEQ ID NO: 12208 - DNA, 20 bp, Unknown
  Description of Unknown: gRNA target site sequence
tcccgaccctcccgtcgccg

SEQ ID NO: 12209 - DNA, 20 bp, Unknown
  Description of Unknown: gRNA target site sequence
cccgaccctcccgtcgccgt

SEQ ID NO: 12210 - DNA, 20 bp, Unknown
  Description of Unknown: gRNA target site sequence
cctcccgtcgccgtaggcca

SEQ ID NO: 12211 - DNA, 20 bp, Unknown
  Description of Unknown: gRNA target site sequence
ctcccgtcgccgtaggccaa

SEQ ID NO: 12212 - DNA, 20 bp, Unknown
  Description of Unknown: gRNA target site sequence
tctcccctgctccccgccga

SEQ ID NO: 12213 - DNA, 20 bp, Unknown
  Description of Unknown: gRNA target site sequence
ctcccctgctccccgccgaa

SEQ ID NO: 12214 - DNA, 20 bp, Unknown
  Description of Unknown: gRNA target site sequence
tcccctgctccccgccgaaa

SEQ ID NO: 12215 - DNA, 20 bp, Unknown
  Description of Unknown: gRNA target site sequence
cccctgctccccgccgaaag

SEQ ID NO: 12216 - DNA, 20 bp, Unknown
  Description of Unknown: gRNA target site sequence
tgctccccgccgaaaggggc

SEQ ID NO: 12217 - DNA, 20 bp, Unknown
  Description of Unknown: gRNA target site sequence
tccccgccgaaaggggcaag

SEQ ID NO: 12218 - DNA, 20 bp, Unknown
  Description of Unknown: gRNA target site sequence
ggggcaagtagcgcgcgtcc

SEQ ID NO: 12219 - DNA, 20 bp, Unknown
  Description of Unknown: gRNA target site sequence
gggcaagtagcgcgcgtccc

SEQ ID NO: 12220 - DNA, 20 bp, Unknown
  Description of Unknown: gRNA target site sequence
cgcacccccttccccactcc

SEQ ID NO: 12221 - DNA, 20 bp, Unknown
  Description of Unknown: gRNA target site sequence
gcacccccttccccactccc

SEQ ID NO: 12222 - DNA, 20 bp, Unknown
  Description of Unknown: gRNA target site sequence
ggccaccccgccgcttcccc

SEQ ID NO: 12223 - DNA, 20 bp, Unknown
  Description of Unknown: gRNA target site sequence
cccgccgcttccccgagatc

SEQ ID NO: 12224 - DNA, 20 bp, Unknown
  Description of Unknown: gRNA target site sequence
gcttccccgagatccagccc

SEQ ID NO: 12225 - DNA, 20 bp, Unknown
  Description of Unknown: gRNA target site sequence
cccgagatccagccctggac

SEQ ID NO: 12226 - DNA, 20 bp, Unknown
  Description of Unknown: gRNA target site sequence
ccagccctggactagcccca

SEQ ID NO: 12227 - DNA, 20 bp, Unknown
  Description of Unknown: gRNA target site sequence
gccctggactagccccacgg

SEQ ID NO: 12228 - DNA, 20 bp, Unknown
  Description of Unknown: gRNA target site sequence
ccctggactagccccacggc

SEQ ID NO: 12229 - DNA, 20 bp, Unknown
  Description of Unknown: gRNA target site sequence
tagccccacggcgggccacc

SEQ ID NO: 12230 - DNA, 20 bp, Unknown
  Description of Unknown: gRNA target site sequence
agccccacggcgggccacca

SEQ ID NO: 12231 - DNA, 20 bp, Unknown
  Description of Unknown: gRNA target site sequence
ccccacggcgggccaccaag

SEQ ID NO: 12232 - DNA, 20 bp, Unknown
  Description of Unknown: gRNA target site sequence
gcgggccaccaaggagaact

SEQ ID NO: 12233 - DNA, 20 bp, Unknown
  Description of Unknown: gRNA target site sequence
gggccaccaaggagaacttg

SEQ ID NO: 12234 - DNA, 20 bp, Unknown
  Description of Unknown: gRNA target site sequence
ccaccaaggagaacttggag

SEQ ID NO: 12235 - DNA, 20 bp, Unknown
  Description of Unknown: gRNA target site sequence
caccaaggagaacttggaga

SEQ ID NO: 12236 - DNA, 20 bp, Unknown
  Description of Unknown: gRNA target site sequence
accaaggagaacttggagaa

SEQ ID NO: 12237 - DNA, 20 bp, Unknown
  Description of Unknown: gRNA target site sequence
aaggagaacttggagaaggg

SEQ ID NO: 12238 - DNA, 20 bp, Unknown
  Description of Unknown: gRNA target site sequence
aacttggagaagggaagtca

SEQ ID NO: 12239 - DNA, 20 bp, Unknown
  Description of Unknown: gRNA target site sequence
cttggagaagggaagtcacg

SEQ ID NO: 12240 - DNA, 20 bp, Unknown
  Description of Unknown: gRNA target site sequence
gagaagggaagtcacggagc

SEQ ID NO: 12241 - DNA, 20 bp, Unknown
  Description of Unknown: gRNA target site sequence
gaagggaagtcacggagcga

SEQ ID NO: 12242 - DNA, 20 bp, Unknown
  Description of Unknown: gRNA target site sequence
agggaagtcacggagcgaga

SEQ ID NO: 12243 - DNA, 20 bp, Unknown
  Description of Unknown: gRNA target site sequence
agtcacggagcgagagagca

SEQ ID NO: 12244 - DNA, 20 bp, Unknown
  Description of Unknown: gRNA target site sequence
acggagcgagagagcacagc

SEQ ID NO: 12245 - DNA, 20 bp, Unknown
  Description of Unknown: gRNA target site sequence
cggagcgagagagcacagcg

SEQ ID NO: 12246 - DNA, 20 bp, Unknown
  Description of Unknown: gRNA target site sequence
ggagcgagagagcacagcga

SEQ ID NO: 12247 - DNA, 20 bp, Unknown
  Description of Unknown: gRNA target site sequence
agagagcacagcgagggcca

SEQ ID NO: 12248 - DNA, 20 bp, Unknown
  Description of Unknown: gRNA target site sequence
agagcacagcgagggccaca

SEQ ID NO: 12249 - DNA, 20 bp, Unknown
  Description of Unknown: gRNA target site sequence
gagcacagcgagggccacag

SEQ ID NO: 12250 - DNA, 20 bp, Unknown
  Description of Unknown: gRNA target site sequence
agcacagcgagggccacaga

SEQ ID NO: 12251 - DNA, 20 bp, Unknown
  Description of Unknown: gRNA target site sequence
agcgagggccacagagggtg

SEQ ID NO: 12252 - DNA, 20 bp, Unknown
  Description of Unknown: gRNA target site sequence
cgagggccacagagggtgca

SEQ ID NO: 12253 - DNA, 20 bp, Unknown
  Description of Unknown: gRNA target site sequence
gggccacagagggtgcagag

SEQ ID NO: 12254 - DNA, 20 bp, Unknown
  Description of Unknown: gRNA target site sequence
ggccacagagggtgcagagc

SEQ ID NO: 12255 - DNA, 20 bp, Unknown
  Description of Unknown: gRNA target site sequence
ccacagagggtgcagagcgg

SEQ ID NO: 12256 - DNA, 20 bp, Unknown
  Description of Unknown: gRNA target site sequence
acagagggtgcagagcggga

SEQ ID NO: 12257 - DNA, 20 bp, Unknown
  Description of Unknown: gRNA target site sequence
cagagggtgcagagcgggag

SEQ ID NO: 12258 - DNA, 20 bp, Unknown
  Description of Unknown: gRNA target site sequence
agggtgcagagcgggagagg

SEQ ID NO: 12259 - DNA, 20 bp, Unknown
  Description of Unknown: gRNA target site sequence
gggtgcagagcgggagagga

SEQ ID NO: 12260 - DNA, 20 bp, Unknown
  Description of Unknown: gRNA target site sequence
cagagcgggagaggaaggac

SEQ ID NO: 12261 - DNA, 20 bp, Unknown
  Description of Unknown: gRNA target site sequence
gagcgggagaggaaggacca

SEQ ID NO: 12262 - DNA, 20 bp, Unknown
  Description of Unknown: gRNA target site sequence
cgggagaggaaggaccagag

SEQ ID NO: 12263 - DNA, 20 bp, Unknown
  Description of Unknown: gRNA target site sequence
gggagaggaaggaccagagc

SEQ ID NO: 12264 - DNA, 20 bp, Unknown
  Description of Unknown: gRNA target site sequence
gagaggaaggaccagagcgg

SEQ ID NO: 12265 - DNA, 20 bp, Unknown
  Description of Unknown: gRNA target site sequence
agaggaaggaccagagcggg

SEQ ID NO: 12266 - DNA, 20 bp, Unknown
  Description of Unknown: gRNA target site sequence
gaggaaggaccagagcggga

SEQ ID NO: 12267 - DNA, 20 bp, Unknown
  Description of Unknown: gRNA target site sequence
gaaggaccagagcgggaggg

SEQ ID NO: 12268 - DNA, 20 bp, Unknown
  Description of Unknown: gRNA target site sequence
aaggaccagagcgggagggt

SEQ ID NO: 12269 - DNA, 20 bp, Unknown
  Description of Unknown: gRNA target site sequence
ggaccagagcgggagggtag

SEQ ID NO: 12270 - DNA, 20 bp, Unknown
  Description of Unknown: gRNA target site sequence
accagagcgggagggtagga

SEQ ID NO: 12271 - DNA, 20 bp, Unknown
  Description of Unknown: gRNA target site sequence
agggtaggagagactcacgc

SEQ ID NO: 12272 - DNA, 20 bp, Unknown
  Description of Unknown: gRNA target site sequence
taggagagactcacgctgga

SEQ ID NO: 12273 - DNA, 20 bp, Unknown
  Description of Unknown: gRNA target site sequence
gactcacgctggatagcctc

SEQ ID NO: 12274 - DNA, 20 bp, Unknown
  Description of Unknown: gRNA target site sequence
actcacgctggatagcctcc

SEQ ID NO: 12275 - DNA, 20 bp, Unknown
  Description of Unknown: gRNA target site sequence
acgctggatagcctccaggc

SEQ ID NO: 12276 - DNA, 20 bp, Unknown
  Description of Unknown: gRNA target site sequence
tggatagcctccaggccaga

SEQ ID NO: 12277 - DNA, 20 bp, Unknown
  Description of Unknown: gRNA target site sequence
gatagcctccaggccagaaa

SEQ ID NO: 12278 - DNA, 20 bp, Unknown
  Description of Unknown: gRNA target site sequence
tagcctccaggccagaaaga

SEQ ID NO: 12279 - DNA, 20 bp, Unknown
  Description of Unknown: gRNA target site sequence
gcctccaggccagaaagaga

SEQ ID NO: 12280 - DNA, 20 bp, Unknown
  Description of Unknown: gRNA target site sequence
tccaggccagaaagagagag

SEQ ID NO: 12281 - DNA, 20 bp, Unknown
  Description of Unknown: gRNA target site sequence
ccagaaagagagagtagcgc

SEQ ID NO: 12282 - DNA, 20 bp, Unknown
  Description of Unknown: gRNA target site sequence
aagagagagtagcgcgagca

SEQ ID NO: 12283 - DNA, 20 bp, Unknown
  Description of Unknown: gRNA target site sequence
agagtagcgcgagcacagct

SEQ ID NO: 12284 - DNA, 20 bp, Unknown
  Description of Unknown: gRNA target site sequence
gagtagcgcgagcacagcta

SEQ ID NO: 12285 - DNA, 20 bp, Unknown
  Description of Unknown: gRNA target site sequence
cgcgagcacagctaaggcca

SEQ ID NO: 12286 - DNA, 20 bp, Unknown
  Description of Unknown: gRNA target site sequence
cgagcacagctaaggccacg

SEQ ID NO: 12287 - DNA, 20 bp, Unknown
  Description of Unknown: gRNA target site sequence
cacagctaaggccacggagc

SEQ ID NO: 12288 - DNA, 20 bp, Unknown
  Description of Unknown: gRNA target site sequence
ggccacggagcgagacatct

SEQ ID NO: 12289 - DNA, 20 bp, Unknown
  Description of Unknown: gRNA target site sequence
catctcggcccgaatgctgt

SEQ ID NO: 12290 - DNA, 20 bp, Unknown
  Description of Unknown: gRNA target site sequence
ggcccgaatgctgtcagctt

SEQ ID NO: 12291 - DNA, 20 bp, Unknown
  Description of Unknown: gRNA target site sequence
gcccgaatgctgtcagcttc

SEQ ID NO: 12292 - DNA, 20 bp, Unknown
  Description of Unknown: gRNA target site sequence
tcagcttcaggaatgcccgc

SEQ ID NO: 12293 - DNA, 20 bp, Unknown
  Description of Unknown: gRNA target site sequence
acttatattaaacgcgtgcc

SEQ ID NO: 12294 - DNA, 20 bp, Unknown
  Description of Unknown: gRNA target site sequence
taaacgcgtgcccagccaat

SEQ ID NO: 12295 - DNA, 20 bp, Unknown
  Description of Unknown: gRNA target site sequence
aaacgcgtgcccagccaatc

SEQ ID NO: 12296 - DNA, 20 bp, Unknown
  Description of Unknown: gRNA target site sequence
cgtgcccagccaatcaggac

SEQ ID NO: 12297 - DNA, 20 bp, Unknown
  Description of Unknown: gRNA target site sequence
gtgcccagccaatcaggaca

SEQ ID NO: 12298 - DNA, 20 bp, Unknown
  Description of Unknown: gRNA target site sequence
gccaatcaggacaaggcccg

SEQ ID NO: 12299 - DNA, 20 bp, Unknown
  Description of Unknown: gRNA target site sequence
ccaatcaggacaaggcccgc

SEQ ID NO: 12300 - DNA, 20 bp, Unknown
  Description of Unknown: gRNA target site sequence
caatcaggacaaggcccgca

SEQ ID NO: 12301 - DNA, 26 bp, Unknown
  Description of Unknown: gRNA target site sequence
ggacttcgtctaggcgcccgctaagt

SEQ ID NO: 12302 - DNA, 26 bp, Unknown
  Description of Unknown: gRNA target site sequence
gtcgataagcgtcagagcgccgaggt

SEQ ID NO: 12303 - DNA, 26 bp, Unknown
  Description of Unknown: gRNA target site sequence
cctttggcctacggcgacgggagggt

SEQ ID NO: 12304 - DNA, 26 bp, Unknown
  Description of Unknown: gRNA target site sequence
tgtgatacaaagcggtttcgaataat

SEQ ID NO: 12305 - DNA, 26 bp, Unknown
  Description of Unknown: gRNA target site sequence
aggggcaagtagcgcgcgtcccgggt

SEQ ID NO: 12306 - DNA, 26 bp, Unknown
  Description of Unknown: gRNA target site sequence
tcgtcccaaaggcgcggcgctgaggt

SEQ ID NO: 12307 - DNA, 26 bp, Unknown
  Description of Unknown: gRNA target site sequence
acggtccctgcgggccttgtcctgat

SEQ ID NO: 12308 - DNA, 26 bp, Unknown
  Description of Unknown: gRNA target site sequence
acggagcgagacatctcggcccgaat

SEQ ID NO: 12309 - DNA, 26 bp, Unknown
  Description of Unknown: gRNA target site sequence
gaacttagcgggcgcctagacgaagt

SEQ ID NO: 12310 - DNA, 26 bp, Unknown
  Description of Unknown: gRNA target site sequence
gaaacagcacgcgacgtttgtagaat

SEQ ID NO: 12311 - DNA, 26 bp, Unknown
  Description of Unknown: gRNA target site sequence
ccctcccgtcgccgtaggccaaaggt

SEQ ID NO: 12312 - DNA, 26 bp, Unknown
  Description of Unknown: gRNA target site sequence
gcatgcgctcccgcaaaagccctggt

SEQ ID NO: 12313 - DNA, 26 bp, Unknown
  Description of Unknown: gRNA target site sequence
tgagcgcgcttagtgtattgccaggt

SEQ ID NO: 12314 - DNA, 26 bp, Unknown
  Description of Unknown: gRNA target site sequence
cctgattggctgggcacgcgtttaat

SEQ ID NO: 12315 - DNA, 26 bp, Unknown
  Description of Unknown: gRNA target site sequence
tggctgggcacgcgtttaatataagt

SEQ ID NO: 12316 - DNA, 26 bp, Unknown
  Description of Unknown: gRNA target site sequence
aatggttgagttggacccgataaaat

SEQ ID NO: 12317 - DNA, 26 bp, Unknown
  Description of Unknown: gRNA target site sequence
ccaagactgttgaggacgccagagat

SEQ ID NO: 12318 - DNA, 26 bp, Unknown
  Description of Unknown: gRNA target site sequence
ttatattaaacgcgtgcccagccaat

SEQ ID NO: 12319 - DNA, 26 bp, Unknown
  Description of Unknown: gRNA target site sequence
catagtagttatctatggcggaagat

SEQ ID NO: 12320 - DNA, 26 bp, Unknown
  Description of Unknown: gRNA target site sequence
cctgctccccgccgaaaggggcaagt

SEQ ID NO: 12321 - DNA, 26 bp, Unknown
  Description of Unknown: gRNA target site sequence
gttaagatagttaagcgtgcataagt

SEQ ID NO: 12322 - DNA, 26 bp, Unknown
  Description of Unknown: gRNA target site sequence
agaccacagggcccatgccgcccagt

SEQ ID NO: 12323 - DNA, 26 bp, Unknown
  Description of Unknown: gRNA target site sequence
aaaaacgcctgccttctgcgtgagat

SEQ ID NO: 12324 - DNA, 26 bp, Unknown
  Description of Unknown: gRNA target site sequence
aagccctggttaggcttgacttcaat

SEQ ID NO: 12325 - DNA, 26 bp, Unknown
  Description of Unknown: gRNA target site sequence
taagtcaacttcaatgtcggatggat

SEQ ID NO: 12326 - DNA, 26 bp, Unknown
  Description of Unknown: gRNA target site sequence
ataccttcttgagatgttcgttcagt

SEQ ID NO: 12327 - DNA, 26 bp, Unknown
  Description of Unknown: gRNA target site sequence
aaactgggcggcatgggccctgtggt

SEQ ID NO: 12328 - DNA, 26 bp, Unknown
  Description of Unknown: gRNA target site sequence
ccttggtggcccgccgtggggctagt

SEQ ID NO: 12329 - DNA, 26 bp, Unknown
  Description of Unknown: gRNA target site sequence
cagaggaaaaggtgagcgcgcttagt

SEQ ID NO: 12330 - DNA, 26 bp, Unknown
  Description of Unknown: gRNA target site sequence
tgtgacagtgggatttgcgttttaat

SEQ ID NO: 12331 - DNA, 26 bp, Unknown
  Description of Unknown: gRNA target site sequence
gtgtggccccacatagacccagaggt

SEQ ID NO: 12332 - DNA, 26 bp, Unknown
  Description of Unknown: gRNA target site sequence
tcgggtccaactcaaccatttaaggt

SEQ ID NO: 12333 - DNA, 26 bp, Unknown
  Description of Unknown: gRNA target site sequence
cggcgacgggagggtcgggacaaagt

SEQ ID NO: 12334 - DNA, 26 bp, Unknown
  Description of Unknown: gRNA target site sequence
ggttcctaagtggatcaacccaaggt

SEQ ID NO: 12335 - DNA, 26 bp, Unknown
  Description of Unknown: gRNA target site sequence
gggtctgggggaggcgtcgcccgggt

SEQ ID NO: 12336 - DNA, 26 bp, Unknown
  Description of Unknown: gRNA target site sequence
gaaaacagttatcttccgccatagat

SEQ ID NO: 12337 - DNA, 26 bp, Unknown
  Description of Unknown: gRNA target site sequence
gctggatctcggggaagcggcggggt

SEQ ID NO: 12338 - DNA, 26 bp, Unknown
  Description of Unknown: gRNA target site sequence
ggttgatccacttaggaacctcagat

SEQ ID NO: 12339 - DNA, 26 bp, Unknown
  Description of Unknown: gRNA target site sequence
gggagcgcatgccttttggctgtaat

SEQ ID NO: 12340 - DNA, 26 bp, Unknown
  Description of Unknown: gRNA target site sequence
gggtttcatccatccgacattgaagt

SEQ ID NO: 12341 - DNA, 26 bp, Unknown
  Description of Unknown: gRNA target site sequence
gagggtaggagagactcacgctggat

SEQ ID NO: 12342 - DNA, 26 bp, Unknown
  Description of Unknown: gRNA target site sequence
gtcgggacaaagtttagggcgtcgat

SEQ ID NO: 12343 - DNA, 26 bp, Unknown
  Description of Unknown: gRNA target site sequence
agcttgacaccaagttagccccaagt

SEQ ID NO: 12344 - DNA, 26 bp, Unknown
  Description of Unknown: gRNA target site sequence
gaagctgacagcattcgggccgagat

SEQ ID NO: 12345 - DNA, 26 bp, Unknown
  Description of Unknown: gRNA target site sequence
caggtttgaagatgccgcatttggat

SEQ ID NO: 12346 - DNA, 26 bp, Unknown
  Description of Unknown: gRNA target site sequence
ggctgtgatacaaagcggtttcgaat

SEQ ID NO: 12347 - DNA, 26 bp, Unknown
  Description of Unknown: gRNA target site sequence
tagcaattgctctatacgtggcagat

SEQ ID NO: 12348 - DNA, 26 bp, Unknown
  Description of Unknown: gRNA target site sequence
acagaaagatgtcaataacgggtagt

SEQ ID NO: 12349 - DNA, 26 bp, Unknown
  Description of Unknown: gRNA target site sequence
gctggatgacgtgagtaaacctgaat

SEQ ID NO: 12350 - DNA, 26 bp, Unknown
  Description of Unknown: gRNA target site sequence
ggcaaacacagtccccatacaggaat

SEQ ID NO: 12351 - DNA, 26 bp, Unknown
  Description of Unknown: gRNA target site sequence
gttcctgctgggtagctctaaacaat

SEQ ID NO: 12352 - DNA, 26 bp, Unknown
  Description of Unknown: gRNA target site sequence
ctctgtttgagggaaggcggcaagat

SEQ ID NO: 12353 - DNA, 26 bp, Unknown
  Description of Unknown: gRNA target site sequence
gagtctacatgatttggccccaagat

SEQ ID NO: 12354 - DNA, 26 bp, Unknown
  Description of Unknown: gRNA target site sequence
tgaacgcgtggaggggcgcttggggt

SEQ ID NO: 12355 - DNA, 26 bp, Unknown
  Description of Unknown: gRNA target site sequence
aattctactgcccagggtacattgat

SEQ ID NO: 12356 - DNA, 26 bp, Unknown
  Description of Unknown: gRNA target site sequence
gttcgcatgtcctagcacctctgggt

SEQ ID NO: 12357 - DNA, 26 bp, Unknown
  Description of Unknown: gRNA target site sequence
gtgtatccctttggtgctcccaaaat

SEQ ID NO: 12358 - DNA, 26 bp, Unknown
  Description of Unknown: gRNA target site sequence
taagcgtgcataagttaacttccaat

SEQ ID NO: 12359 - DNA, 26 bp, Unknown
  Description of Unknown: gRNA target site sequence
tgtcaataacgggtagttcttataat

SEQ ID NO: 12360 - DNA, 26 bp, Unknown
  Description of Unknown: gRNA target site sequence
agtctctcctaccctcccgctctggt

SEQ ID NO: 12361 - DNA, 26 bp, Unknown
  Description of Unknown: gRNA target site sequence
agccccaagtgaaataccctggcaat

SEQ ID NO: 12362 - DNA, 26 bp, Unknown
  Description of Unknown: gRNA target site sequence
ccccatcaagaggtggattggggaat

SEQ ID NO: 12363 - DNA, 26 bp, Unknown
  Description of Unknown: gRNA target site sequence
gggccaaatcatgtagactcttgagt

SEQ ID NO: 12364 - DNA, 26 bp, Unknown
  Description of Unknown: gRNA target site sequence
acccacattacctgcaaggctttgat

SEQ ID NO: 12365 - DNA, 26 bp, Unknown
  Description of Unknown: gRNA target site sequence
cttccgccatagataactactatggt

SEQ ID NO: 12366 - DNA, 26 bp, Unknown
  Description of Unknown: gRNA target site sequence
ctagacgaagtccacagctctccagt

SEQ ID NO: 12367 - DNA, 26 bp, Unknown
  Description of Unknown: gRNA target site sequence
ataacatctgccacgtatagagcaat

SEQ ID NO: 12368 - DNA, 26 bp, Unknown
  Description of Unknown: gRNA target site sequence
cttaaaaatgcagcgcaatctccagt

SEQ ID NO: 12369 - DNA, 26 bp, Unknown
  Description of Unknown: gRNA target site sequence
gaggttcccaggccactagaggagat

SEQ ID NO: 12370 - DNA, 26 bp, Unknown
  Description of Unknown: gRNA target site sequence
ttcagcatcaatgtaccctgggcagt

SEQ ID NO: 12371 - DNA, 26 bp, Unknown
  Description of Unknown: gRNA target site sequence
gatggggctagtagcctttccttaat

SEQ ID NO: 12372 - DNA, 26 bp, Unknown
  Description of Unknown: gRNA target site sequence
ggtgaattcagtgtagtacaagagat

SEQ ID NO: 12373 - DNA, 26 bp, Unknown
  Description of Unknown: gRNA target site sequence
gatttgaatggggtttcagcatcaat

SEQ ID NO: 12374 - DNA, 26 bp, Unknown
  Description of Unknown: gRNA target site sequence
catgactagaccatccatggggaagt

SEQ ID NO: 12375 - DNA, 26 bp, Unknown
  Description of Unknown: gRNA target site sequence
gaactgccagtatggtattgcaggat

SEQ ID NO: 12376 - DNA, 26 bp, Unknown
  Description of Unknown: gRNA target site sequence
gctactagccccatcaagaggtggat

SEQ ID NO: 12377 - DNA, 26 bp, Unknown
  Description of Unknown: gRNA target site sequence
gtatctgagcaggttgctccacaggt

SEQ ID NO: 12378 - DNA, 26 bp, Unknown
  Description of Unknown: gRNA target site sequence
gagaggaaggaccagagcgggagggt

SEQ ID NO: 12379 - DNA, 26 bp, Unknown
  Description of Unknown: gRNA target site sequence
cgtgtagtaggctacaacacctaggt

SEQ ID NO: 12380 - DNA, 26 bp, Unknown
  Description of Unknown: gRNA target site sequence
tggcctggaggctatccagcgtgagt

SEQ ID NO: 12381 - DNA, 26 bp, Unknown
  Description of Unknown: gRNA target site sequence
tataccatgtagcctatgcgtgtagt

SEQ ID NO: 12382 - DNA, 26 bp, Unknown
  Description of Unknown: gRNA target site sequence
tcccaacctggctagtttacagcaat

SEQ ID NO: 12383 - DNA, 26 bp, Unknown
  Description of Unknown: gRNA target site sequence
tctctggcgtcctcaacagtcttggt

SEQ ID NO: 12384 - DNA, 26 bp, Unknown
  Description of Unknown: gRNA target site sequence
gcccgaatgctgtcagcttcaggaat

SEQ ID NO: 12385 - DNA, 26 bp, Unknown
  Description of Unknown: gRNA target site sequence
gggaagcggcggggtggcctgggagt

SEQ ID NO: 12386 - DNA, 26 bp, Unknown
  Description of Unknown: gRNA target site sequence
gacaccaagttagccccaagtgaaat

SEQ ID NO: 12387 - DNA, 26 bp, Unknown
  Description of Unknown: gRNA target site sequence
taaatggcagcaatcgagattgaagt

SEQ ID NO: 12388 - DNA, 26 bp, Unknown
  Description of Unknown: gRNA target site sequence
ggtatttcacttggggctaacttggt

SEQ ID NO: 12389 - DNA, 26 bp, Unknown
  Description of Unknown: gRNA target site sequence
gcaccaaagggatacactaacaggat

SEQ ID NO: 12390 - DNA, 26 bp, Unknown
  Description of Unknown: gRNA target site sequence
aggccaccccgccgcttccccgagat

SEQ ID NO: 12391 - DNA, 26 bp, Unknown
  Description of Unknown: gRNA target site sequence
gtgtcaagctatatcaggcaccaagt

SEQ ID NO: 12392 - DNA, 26 bp, Unknown
  Description of Unknown: gRNA target site sequence
ccttcctactagcctcagataccaat

SEQ ID NO: 12393 - DNA, 26 bp, Unknown
  Description of Unknown: gRNA target site sequence
acgtttgtagaatgcttggctgtgat

SEQ ID NO: 12394 - DNA, 26 bp, Unknown
  Description of Unknown: gRNA target site sequence
gtcaggggagctgtaaaaccattaat

SEQ ID NO: 12395 - DNA, 26 bp, Unknown
  Description of Unknown: gRNA target site sequence
tctggctcccccagcgcagctggagt

SEQ ID NO: 12396 - DNA, 26 bp, Unknown
  Description of Unknown: gRNA target site sequence
gtcgcgtgctgtttcctccccacggt

SEQ ID NO: 12397 - DNA, 26 bp, Unknown
  Description of Unknown: gRNA target site sequence
ttttgaagaataaaccgtgacttggt

SEQ ID NO: 12398 - DNA, 26 bp, Unknown
  Description of Unknown: gRNA target site sequence
tgccctctctgtagagggtcagtaat

SEQ ID NO: 12399 - DNA, 26 bp, Unknown
  Description of Unknown: gRNA target site sequence
tcagttcataatagcccccatcaaat

SEQ ID NO: 12400 - DNA, 26 bp, Unknown
  Description of Unknown: gRNA target site sequence
caacagtcttggtaaccatcttggat

SEQ ID NO: 12401 - DNA, 26 bp, Unknown
  Description of Unknown: gRNA target site sequence
ctacctgtggagcaacctgctcagat

SEQ ID NO: 12402 - DNA, 26 bp, Unknown
  Description of Unknown: gRNA target site sequence
agatgccgcatttggattggatgaat

SEQ ID NO: 12403 - DNA, 26 bp, Unknown
  Description of Unknown: gRNA target site sequence
aaggtggaagctcatttggccagagt

SEQ ID NO: 12404 - DNA, 26 bp, Unknown
  Description of Unknown: gRNA target site sequence
acaagcccttcctactagcctcagat

SEQ ID NO: 12405 - DNA, 26 bp, Unknown
  Description of Unknown: gRNA target site sequence
tctaggagggctggcaacttagaggt

SEQ ID NO: 12406 - DNA, 26 bp, Unknown
  Description of Unknown: gRNA target site sequence
actttatgtgctttgcgtcatttaat

SEQ ID NO: 12407 - DNA, 26 bp, Unknown
  Description of Unknown: gRNA target site sequence
ctatggccatactaccctgaatgagt

SEQ ID NO: 12408 - DNA, 26 bp, Unknown
  Description of Unknown: gRNA target site sequence
gtgcctgatatagcttgacaccaagt

SEQ ID NO: 12409 - DNA, 26 bp, Unknown
  Description of Unknown: gRNA target site sequence
tggcaaaacatgatcgaaagcagaat

SEQ ID NO: 12410 - DNA, 26 bp, Unknown
  Description of Unknown: gRNA target site sequence
gtaaccacctgcctttatcctgcaat

SEQ ID NO: 12411 - DNA, 26 bp, Unknown
  Description of Unknown: gRNA target site sequence
tagttggagtccaaaggcttttcaat

SEQ ID NO: 12412 - DNA, 26 bp, Unknown
  Description of Unknown: gRNA target site sequence
cttaacaagctttgagtgcaagagat

SEQ ID NO: 12413 - DNA, 26 bp, Unknown
  Description of Unknown: gRNA target site sequence
cctgccttgatctacacccatctgat

SEQ ID NO: 12414 - DNA, 26 bp, Unknown
  Description of Unknown: gRNA target site sequence
acaagtttggtaatgagatctgcaat

SEQ ID NO: 12415 - DNA, 26 bp, Unknown
  Description of Unknown: gRNA target site sequence
tttgtcacagcccaagatagttaagt

SEQ ID NO: 12416 - DNA, 26 bp, Unknown
  Description of Unknown: gRNA target site sequence
gatgtactgtgcctcttactttcggt

SEQ ID NO: 12417 - DNA, 26 bp, Unknown
  Description of Unknown: gRNA target site sequence
ataggctgctgttcctacccatgaat

SEQ ID NO: 12418 - DNA, 26 bp, Unknown
  Description of Unknown: gRNA target site sequence
tcaagatctctggcgtcctcaacagt

SEQ ID NO: 12419 - DNA, 26 bp, Unknown
  Description of Unknown: gRNA target site sequence
tcatgttagagctgtctataaatagt

SEQ ID NO: 12420 - DNA, 26 bp, Unknown
  Description of Unknown: gRNA target site sequence
tggacccgataaaatacaacagggat

SEQ ID NO: 12421 - DNA, 26 bp, Unknown
  Description of Unknown: gRNA target site sequence
aatgcttggctgtgatacaaagcggt

SEQ ID NO: 12422 - DNA, 26 bp, Unknown
  Description of Unknown: gRNA target site sequence
atatcctgttagtgtatccctttggt

SEQ ID NO: 12423 - DNA, 26 bp, Unknown
  Description of Unknown: gRNA target site sequence
ctgaattcacccccactgaaaaagat

SEQ ID NO: 12424 - DNA, 26 bp, Unknown
  Description of Unknown: gRNA target site sequence
agggataggtgaggactatggcaaat

SEQ ID NO: 12425 - DNA, 26 bp, Unknown
  Description of Unknown: gRNA target site sequence
gcctccagagaaaggctcttaaaaat

SEQ ID NO: 12426 - DNA, 26 bp, Unknown
  Description of Unknown: gRNA target site sequence
tcttggtcagatttgaactcttcaat

SEQ ID NO: 12427 - DNA, 26 bp, Unknown
  Description of Unknown: gRNA target site sequence
gcccaagatagttaagtggggtaagt

SEQ ID NO: 12428 - DNA, 26 bp, Unknown
  Description of Unknown: gRNA target site sequence
caggcaggatgaatctgtgctctgat

SEQ ID NO: 12429 - DNA, 26 bp, Unknown
  Description of Unknown: gRNA target site sequence
actggtatttgctggttatgttagat

SEQ ID NO: 12430 - DNA, 26 bp, Unknown
  Description of Unknown: gRNA target site sequence
agccaggacctgaactctaatatagt

SEQ ID NO: 12431 - DNA, 26 bp, Unknown
  Description of Unknown: gRNA target site sequence
gaagagaagtgttagtgctactaaat

SEQ ID NO: 12432 - DNA, 26 bp, Unknown
  Description of Unknown: gRNA target site sequence
tgctgtaaactagccaggttgggaat

SEQ ID NO: 12433 - DNA, 26 bp, Unknown
  Description of Unknown: gRNA target site sequence
atctcagcaggtgccactaatctgat

SEQ ID NO: 12434 - DNA, 26 bp, Unknown
  Description of Unknown: gRNA target site sequence
atgagtgctgagagggcatcagaagt

SEQ ID NO: 12435 - DNA, 26 bp, Unknown
  Description of Unknown: gRNA target site sequence
ggggctagtagcctttccttaatgat

SEQ ID NO: 12436 - DNA, 26 bp, Unknown
  Description of Unknown: gRNA target site sequence
ctggcaaataccttaaatggttgagt

SEQ ID NO: 12437 - DNA, 26 bp, Unknown
  Description of Unknown: gRNA target site sequence
atgggggctattatgaactgagaaat

SEQ ID NO: 12438 - DNA, 26 bp, Unknown
  Description of Unknown: gRNA target site sequence
tcagtaagtcaacttcaatgtcggat

SEQ ID NO: 12439 - DNA, 26 bp, Unknown
  Description of Unknown: gRNA target site sequence
gtgtcttttcccgatattcctcaggt

SEQ ID NO: 12440 - DNA, 26 bp, Unknown
  Description of Unknown: gRNA target site sequence
gtgactttgtcacagcccaagatagt

SEQ ID NO: 12441 - DNA, 26 bp, Unknown
  Description of Unknown: gRNA target site sequence
aggtgattgctgtaaactagccaggt

SEQ ID NO: 12442 - DNA, 26 bp, Unknown
  Description of Unknown: gRNA target site sequence
agaccagtccttgctgaaagacaagt

SEQ ID NO: 12443 - DNA, 26 bp, Unknown
  Description of Unknown: gRNA target site sequence
ccttttagtgatcatgtaccctgaat

SEQ ID NO: 12444 - DNA, 26 bp, Unknown
  Description of Unknown: gRNA target site sequence
gacccctctctgactttgtacctaat

SEQ ID NO: 12445 - DNA, 26 bp, Unknown
  Description of Unknown: gRNA target site sequence
actggagaagtccaggattataggat

SEQ ID NO: 12446 - DNA, 26 bp, Unknown
  Description of Unknown: gRNA target site sequence
tctgcccagtcacactgttagtaaat

SEQ ID NO: 12447 - DNA, 26 bp, Unknown
  Description of Unknown: gRNA target site sequence
cttgagatgttcgttcagtgctaaat

SEQ ID NO: 12448 - DNA, 26 bp, Unknown
  Description of Unknown: gRNA target site sequence
atctgaccaagatgttgatgttggat

SEQ ID NO: 12449 - DNA, 26 bp, Unknown
  Description of Unknown: gRNA target site sequence
tacagcaatcacctgtggatgctaat

SEQ ID NO: 12450 - DNA, 26 bp, Unknown
  Description of Unknown: gRNA target site sequence
cgatattcctcaggtactccaaagat

SEQ ID NO: 12451 - DNA, 26 bp, Unknown
  Description of Unknown: gRNA target site sequence
ggagtaccaggccaccttgaccagat

SEQ ID NO: 12452 - DNA, 26 bp, Unknown
  Description of Unknown: gRNA target site sequence
cattgatgctgaaaccccattcaaat

SEQ ID NO: 12453 - DNA, 26 bp, Unknown
  Description of Unknown: gRNA target site sequence
cctgaatgagtcccatcccatctgat

SEQ ID NO: 12454 - DNA, 26 bp, Unknown
  Description of Unknown: gRNA target site sequence
gccagtaggtaagaagtgttaagagt

SEQ ID NO: 12455 - DNA, 26 bp, Unknown
  Description of Unknown: gRNA target site sequence
ccttaaatggttgagttggacccgat

SEQ ID NO: 12456 - DNA, 26 bp, Unknown
  Description of Unknown: gRNA target site sequence
aatgcctcagggatcagagcacagat

SEQ ID NO: 12457 - DNA, 26 bp, Unknown
  Description of Unknown: gRNA target site sequence
tggctggattggtatctgaggctagt

SEQ ID NO: 12458 - DNA, 26 bp, Unknown
  Description of Unknown: gRNA target site sequence
gaattgggagaaatcgatgaccaaat

SEQ ID NO: 12459 - DNA, 26 bp, Unknown
  Description of Unknown: gRNA target site sequence
tggttaggcttgacttcaatctcgat

SEQ ID NO: 12460 - DNA, 26 bp, Unknown
  Description of Unknown: gRNA target site sequence
tcaaaaccgaaagtaagaggcacagt

SEQ ID NO: 12461 - DNA, 26 bp, Unknown
  Description of Unknown: gRNA target site sequence
cactatgtggagaacattgacagagt

SEQ ID NO: 12462 - DNA, 26 bp, Unknown
  Description of Unknown: gRNA target site sequence
atgccgcccagtttgctctggagaat

SEQ ID NO: 12463 - DNA, 26 bp, Unknown
  Description of Unknown: gRNA target site sequence
agagcacagcgagggccacagagggt

SEQ ID NO: 12464 - DNA, 26 bp, Unknown
  Description of Unknown: gRNA target site sequence
gaagctcatttggccagagtggaaat

SEQ ID NO: 12465 - DNA, 26 bp, Unknown
  Description of Unknown: gRNA target site sequence
catgaagaaggtgtatggccccaggt

SEQ ID NO: 12466 - DNA, 26 bp, Unknown
  Description of Unknown: gRNA target site sequence
gtcccatcccatctgatataaacaat

SEQ ID NO: 12467 - DNA, 26 bp, Unknown
  Description of Unknown: gRNA target site sequence
gatgttattatctgaggttcctaagt

SEQ ID NO: 12468 - DNA, 26 bp, Unknown
  Description of Unknown: gRNA target site sequence
tgatccacttaggaacctcagataat

SEQ ID NO: 12469 - DNA, 26 bp, Unknown
  Description of Unknown: gRNA target site sequence
cgtgagtaaacctgaatctttggagt

SEQ ID NO: 12470 - DNA, 26 bp, Unknown
  Description of Unknown: gRNA target site sequence
cccgataaaatacaacagggataggt

SEQ ID NO: 12471 - DNA, 26 bp, Unknown
  Description of Unknown: gRNA target site sequence
tttactcacgtcatccagcagagaat

SEQ ID NO: 12472 - DNA, 26 bp, Unknown
  Description of Unknown: gRNA target site sequence
ccaaatcatgtagactcttgagtgat

SEQ ID NO: 12473 - DNA, 26 bp, Unknown
  Description of Unknown: gRNA target site sequence
cagcaaataccagtaatggtggtgat

SEQ ID NO: 12474 - DNA, 26 bp, Unknown
  Description of Unknown: gRNA target site sequence
acacatgactatattagagttcaggt

SEQ ID NO: 12475 - DNA, 26 bp, Unknown
  Description of Unknown: gRNA target site sequence
catgatcgaaagcagaatgttttgat

SEQ ID NO: 12476 - DNA, 26 bp, Unknown
  Description of Unknown: gRNA target site sequence
ctccttgtagttacatctattatagt

SEQ ID NO: 12477 - DNA, 26 bp, Unknown
  Description of Unknown: gRNA target site sequence
taaagtaaggcatggttgtggttaat

SEQ ID NO: 12478 - DNA, 26 bp, Unknown
  Description of Unknown: gRNA target site sequence
gcactgaacgaacatctcaagaaggt

SEQ ID NO: 12479 - DNA, 26 bp, Unknown
  Description of Unknown: gRNA target site sequence
tgcacaaaatgtagggttataataat

SEQ ID NO: 12480 - DNA, 26 bp, Unknown
  Description of Unknown: gRNA target site sequence
gactccaactaaagatgcagagaagt

SEQ ID NO: 12481 - DNA, 26 bp, Unknown
  Description of Unknown: gRNA target site sequence
ggcttttgagctatcatggcgccagt

SEQ ID NO: 12482 - DNA, 26 bp, Unknown
  Description of Unknown: gRNA target site sequence
ttgatttgggagagcatcaggaaggt

SEQ ID NO: 12483 - DNA, 26 bp, Unknown
  Description of Unknown: gRNA target site sequence
ttacacaggggataaatggcagcaat

SEQ ID NO: 12484 - DNA, 26 bp, Unknown
  Description of Unknown: gRNA target site sequence
ttaactatcttgggctgtgacaaagt

SEQ ID NO: 12485 - DNA, 26 bp, Unknown
  Description of Unknown: gRNA target site sequence
ctgaatctttggagtacctgaggaat

SEQ ID NO: 12486 - DNA, 26 bp, Unknown
  Description of Unknown: gRNA target site sequence
ccaagtgtttacatttggtcatcgat

SEQ ID NO: 12487 - DNA, 26 bp, Unknown
  Description of Unknown: gRNA target site sequence
tcagtatctcagcaggtgccactaat

SEQ ID NO: 12488 - DNA, 26 bp, Unknown
  Description of Unknown: gRNA target site sequence
cagatgggatgggactcattcagggt

SEQ ID NO: 12489 - DNA, 26 bp, Unknown
  Description of Unknown: gRNA target site sequence
tctggaggctctcaaggacttctgat

SEQ ID NO: 12490 - DNA, 26 bp, Unknown
  Description of Unknown: gRNA target site sequence
ggagctgtaaaaccattaataaagat

SEQ ID NO: 12491 - DNA, 26 bp, Unknown
  Description of Unknown: gRNA target site sequence
cacagcccaagatagttaagtggggt

SEQ ID NO: 12492 - DNA, 26 bp, Unknown
  Description of Unknown: gRNA target site sequence
gtccttgctgaaagacaagtctgaat

SEQ ID NO: 12493 - DNA, 26 bp, Unknown
  Description of Unknown: gRNA target site sequence
ctttgagtgctgtctccatgtttgat

SEQ ID NO: 12494 - DNA, 26 bp, Unknown
  Description of Unknown: gRNA target site sequence
ttagattccccaatccacctcttgat

SEQ ID NO: 12495 - DNA, 26 bp, Unknown
  Description of Unknown: gRNA target site sequence
ctgggcagatcatccaccttcctgat

SEQ ID NO: 12496 - DNA, 26 bp, Unknown
  Description of Unknown: gRNA target site sequence
acacatcactcaagagtctacatgat

SEQ ID NO: 12497 - DNA, 26 bp, Unknown
  Description of Unknown: gRNA target site sequence
cggcaggcatactcatctttttcagt

SEQ ID NO: 12498 - DNA, 26 bp, Unknown
  Description of Unknown: gRNA target site sequence
gcactctactagacacttcatacagt

SEQ ID NO: 12499 - DNA, 26 bp, Unknown
  Description of Unknown: gRNA target site sequence
tttctatctcttgtactacactgaat

SEQ ID NO: 12500 - DNA, 26 bp, Unknown
  Description of Unknown: gRNA target site sequence
ataaccctacattttgtgcataaagt

SEQ ID NO: 12501 - DNA, 26 bp, Unknown
  Description of Unknown: gRNA target site sequence
ctaaatgcatacaagagctggcaaat

SEQ ID NO: 12502 - DNA, 26 bp, Unknown
  Description of Unknown: gRNA target site sequence
agttctccaaacccattataaagagt

SEQ ID NO: 12503 - DNA, 26 bp, Unknown
  Description of Unknown: gRNA target site sequence
ttgaagagttcaaatctgaccaagat

SEQ ID NO: 12504 - DNA, 26 bp, Unknown
  Description of Unknown: gRNA target site sequence
atcagattagtggcacctgctgagat

SEQ ID NO: 12505 - DNA, 26 bp, Unknown
  Description of Unknown: gRNA target site sequence
tcagcagagatgtccaatgtggaaat

SEQ ID NO: 12506 - DNA, 26 bp, Unknown
  Description of Unknown: gRNA target site sequence
gtaggaagggcttgttcctgctgggt

SEQ ID NO: 12507 - DNA, 26 bp, Unknown
  Description of Unknown: gRNA target site sequence
ccatgatgctgcttacatgtctcgat

SEQ ID NO: 12508 - DNA, 26 bp, Unknown
  Description of Unknown: gRNA target site sequence
ccattcttcagtaagtcaacttcaat

SEQ ID NO: 12509 - DNA, 26 bp, Unknown
  Description of Unknown: gRNA target site sequence
ttgataaagtaaggcatggttgtggt

SEQ ID NO: 12510 - DNA, 26 bp, Unknown
  Description of Unknown: gRNA target site sequence
ttgtttggtaagaacataccttgggt

SEQ ID NO: 12511 - DNA, 26 bp, Unknown
  Description of Unknown: gRNA target site sequence
cacagcatggtttctgaaccagtagt

SEQ ID NO: 12512 - DNA, 26 bp, Unknown
  Description of Unknown: gRNA target site sequence
tttctaaactgtatgaagtgtctagt

SEQ ID NO: 12513 - DNA, 26 bp, Unknown
  Description of Unknown: gRNA target site sequence
gagaagggaacatgaccctgtaggat

SEQ ID NO: 12514 - DNA, 26 bp, Unknown
  Description of Unknown: gRNA target site sequence
taaaggggtaatagtgggagtgagat

SEQ ID NO: 12515 - DNA, 26 bp, Unknown
  Description of Unknown: gRNA target site sequence
acaaggaggagtagctgccttttagt

SEQ ID NO: 12516 - DNA, 26 bp, Unknown
  Description of Unknown: gRNA target site sequence
ttgaagatgccgcatttggattggat

SEQ ID NO: 12517 - DNA, 26 bp, Unknown
  Description of Unknown: gRNA target site sequence
caacttagaggtggggagcagagaat

SEQ ID NO: 12518 - DNA, 26 bp, Unknown
  Description of Unknown: gRNA target site sequence
accatgtactaacaaatgtctaaaat

SEQ ID NO: 12519 - DNA, 26 bp, Unknown
  Description of Unknown: gRNA target site sequence
ttcaatgaaattctactgcccagggt

SEQ ID NO: 12520 - DNA, 26 bp, Unknown
  Description of Unknown: gRNA target site sequence
ccacagcctcccagacaaggaggagt

SEQ ID NO: 12521 - DNA, 26 bp, Unknown
  Description of Unknown: gRNA target site sequence
ttccctgacaatcccaatatgcagat

SEQ ID NO: 12522 - DNA, 26 bp, Unknown
  Description of Unknown: gRNA target site sequence
atcctataatcctggacttctccagt

SEQ ID NO: 12523 - DNA, 26 bp, Unknown
  Description of Unknown: gRNA target site sequence
ttctgaaccagtagtttccctgcagt

SEQ ID NO: 12524 - DNA, 26 bp, Unknown
  Description of Unknown: gRNA target site sequence
ttgctgccatttatcccctgtgtaat

SEQ ID NO: 12525 - DNA, 26 bp, Unknown
  Description of Unknown: gRNA target site sequence
ttgttttactgtgggcataaattaat

SEQ ID NO: 12526 - DNA, 26 bp, Unknown
  Description of Unknown: gRNA target site sequence
gactcttgagtgatgtgttaaggaat

SEQ ID NO: 12527 - DNA, 26 bp, Unknown
  Description of Unknown: gRNA target site sequence
aaatggaggtggcttgttgggaaggt

SEQ ID NO: 12528 - DNA, 26 bp, Unknown
  Description of Unknown: gRNA target site sequence
gccaggttgggaatatattgcctaat

SEQ ID NO: 12529 - DNA, 26 bp, Unknown
  Description of Unknown: gRNA target site sequence
ctcagaacatgtccccgtcattaagt

SEQ ID NO: 12530 - DNA, 26 bp, Unknown
  Description of Unknown: gRNA target site sequence
taacataaccagcaaataccagtaat

SEQ ID NO: 12531 - DNA, 26 bp, Unknown
  Description of Unknown: gRNA target site sequence
agattttgtgagagcatcactgtaat

SEQ ID NO: 12532 - DNA, 26 bp, Unknown
  Description of Unknown: gRNA target site sequence
agacttgtctttcagcaaggactggt

SEQ ID NO: 12533 - DNA, 26 bp, Unknown
  Description of Unknown: gRNA target site sequence
ggcaatatattcccaacctggctagt

SEQ ID NO: 12534 - DNA, 26 bp, Unknown
  Description of Unknown: gRNA target site sequence
ctcttgcactcaaagcttgttaagat

SEQ ID NO: 12535 - DNA, 26 bp, Unknown
  Description of Unknown: gRNA target site sequence
tcaggaaggtggatgatctgcccagt

SEQ ID NO: 12536 - DNA, 26 bp, Unknown
  Description of Unknown: gRNA target site sequence
gtcaatgttctccacatagtgagggt

SEQ ID NO: 12537 - DNA, 26 bp, Unknown
  Description of Unknown: gRNA target site sequence
gtttcttaaaatctcggtgccttagt

SEQ ID NO: 12538 - DNA, 26 bp, Unknown
  Description of Unknown: gRNA target site sequence
ggagcagcagcagcacttgcacaaat

SEQ ID NO: 12539 - DNA, 26 bp, Unknown
  Description of Unknown: gRNA target site sequence
gctttgagtgcaagagattgaagagt

SEQ ID NO: 12540 - DNA, 26 bp, Unknown
  Description of Unknown: gRNA target site sequence
tgagcactttctaagtacctggcaat

SEQ ID NO: 12541 - DNA, 26 bp, Unknown
  Description of Unknown: gRNA target site sequence
gtgacatgtgatgggaacaaataagt

SEQ ID NO: 12542 - DNA, 26 bp, Unknown
  Description of Unknown: gRNA target site sequence
ctcagataccaatccagccagaaagt

SEQ ID NO: 12543 - DNA, 26 bp, Unknown
  Description of Unknown: gRNA target site sequence
gttcagaaaccatgctgtgcatcagt

SEQ ID NO: 12544 - DNA, 26 bp, Unknown
  Description of Unknown: gRNA target site sequence
tgtgagaggcagaagataaccatagt

SEQ ID NO: 12545 - DNA, 26 bp, Unknown
  Description of Unknown: gRNA target site sequence
gccgtggggctagtccagggctggat

SEQ ID NO: 12546 - DNA, 26 bp, Unknown
  Description of Unknown: gRNA target site sequence
cgctccgtgacttcccttctccaagt

SEQ ID NO: 12547 - DNA, 26 bp, Unknown
  Description of Unknown: gRNA target site sequence
gccatttatcccctgtgtaattaagt

SEQ ID NO: 12548 - DNA, 26 bp, Unknown
  Description of Unknown: gRNA target site sequence
ctagaggaagccagtaggtaagaagt

SEQ ID NO: 12549 - DNA, 26 bp, Unknown
  Description of Unknown: gRNA target site sequence
tccaccttcctgatgctctcccaaat

SEQ ID NO: 12550 - DNA, 26 bp, Unknown
  Description of Unknown: gRNA target site sequence
aacttggacttctctgcatctttagt

SEQ ID NO: 12551 - DNA, 26 bp, Unknown
  Description of Unknown: gRNA target site sequence
ccaagtcacggtttattcttcaaaat

SEQ ID NO: 12552 - DNA, 26 bp, Unknown
  Description of Unknown: gRNA target site sequence
tcatttggccagagtggaaatggaat

SEQ ID NO: 12553 - DNA, 26 bp, Unknown
  Description of Unknown: gRNA target site sequence
atccagccagaaagtactggagaagt

SEQ ID NO: 12554 - DNA, 26 bp, Unknown
  Description of Unknown: gRNA target site sequence
agatctcattaccaaacttgtctaat

SEQ ID NO: 12555 - DNA, 26 bp, Unknown
  Description of Unknown: gRNA target site sequence
atttagtgtcaatctgtatatttagt

SEQ ID NO: 12556 - DNA, 26 bp, Unknown
  Description of Unknown: gRNA target site sequence
acatttggtcatcgatttctcccaat

SEQ ID NO: 12557 - DNA, 26 bp, Unknown
  Description of Unknown: gRNA target site sequence
gtatgttctgtcccatttgccatagt

SEQ ID NO: 12558 - DNA, 26 bp, Unknown
  Description of Unknown: gRNA target site sequence
acgtcatccagcagagaatggaaagt

SEQ ID NO: 12559 - DNA, 26 bp, Unknown
  Description of Unknown: gRNA target site sequence
tcttttaaaaaggtgatctacacagt

SEQ ID NO: 12560 - DNA, 26 bp, Unknown
  Description of Unknown: gRNA target site sequence
cagcgcaatctccagtgacagaagat

SEQ ID NO: 12561 - DNA, 26 bp, Unknown
  Description of Unknown: gRNA target site sequence
tctagagagatatatctggtcaaggt

SEQ ID NO: 12562 - DNA, 26 bp, Unknown
  Description of Unknown: gRNA target site sequence
ctcttatccaacatcaacatcttggt

SEQ ID NO: 12563 - DNA, 26 bp, Unknown
  Description of Unknown: gRNA target site sequence
cccagacacatagcaattcaggaaat

SEQ ID NO: 12564 - DNA, 26 bp, Unknown
  Description of Unknown: gRNA target site sequence
tggagtaatgcatgtgacagtgggat

SEQ ID NO: 12565 - DNA, 26 bp, Unknown
  Description of Unknown: gRNA target site sequence
agttcaaatctgaccaagatgttgat

SEQ ID NO: 12566 - DNA, 26 bp, Unknown
  Description of Unknown: gRNA target site sequence
aaattagacaagtttggtaatgagat

SEQ ID NO: 12567 - DNA, 26 bp, Unknown
  Description of Unknown: gRNA target site sequence
cgttttaattagcatccacaggtgat

SEQ ID NO: 12568 - DNA, 26 bp, Unknown
  Description of Unknown: gRNA target site sequence
aaaggctactagccccatcaagaggt

SEQ ID NO: 12569 - DNA, 26 bp, Unknown
  Description of Unknown: gRNA target site sequence
ggaatatcgggaaaagacacattaat

SEQ ID NO: 12570 - DNA, 26 bp, Unknown
  Description of Unknown: gRNA target site sequence
ctagtttacagcaatcacctgtggat

SEQ ID NO: 12571 - DNA, 26 bp, Unknown
  Description of Unknown: gRNA target site sequence
tggaaacagagtacaataacatgagt

SEQ ID NO: 12572 - DNA, 26 bp, Unknown
  Description of Unknown: gRNA target site sequence
gattgtcagggaatgttcttaaagat

SEQ ID NO: 12573 - DNA, 26 bp, Unknown
  Description of Unknown: gRNA target site sequence
cacaaccatgccttactttatcaaat

SEQ ID NO: 12574 - DNA, 26 bp, Unknown
  Description of Unknown: gRNA target site sequence
cataaccagcaaataccagtaatggt

SEQ ID NO: 12575 - DNA, 26 bp, Unknown
  Description of Unknown: gRNA target site sequence
agtgatcatgtaccctgaatataagt

SEQ ID NO: 12576 - DNA, 26 bp, Unknown
  Description of Unknown: gRNA target site sequence
atgggatgggactcattcagggtagt

SEQ ID NO: 12577 - DNA, 26 bp, Unknown
  Description of Unknown: gRNA target site sequence
gatatatctggtcaaggtggcctggt

SEQ ID NO: 12578 - DNA, 26 bp, Unknown
  Description of Unknown: gRNA target site sequence
ttatcatgttagagctgtctataaat

SEQ ID NO: 12579 - DNA, 26 bp, Unknown
  Description of Unknown: gRNA target site sequence
aacatggacatgatcttctttataat

SEQ ID NO: 12580 - DNA, 26 bp, Unknown
  Description of Unknown: gRNA target site sequence
ttcagtgggggtgaattcagtgtagt

SEQ ID NO: 12581 - DNA, 26 bp, Unknown
  Description of Unknown: gRNA target site sequence
gctgatatgatgttttggtcaatgat

SEQ ID NO: 12582 - DNA, 26 bp, Unknown
  Description of Unknown: gRNA target site sequence
ctggcatataaaacctcagcagaaat

SEQ ID NO: 12583 - DNA, 26 bp, Unknown
  Description of Unknown: gRNA target site sequence
taatgatagggtgtttctagagagat

SEQ ID NO: 12584 - DNA, 26 bp, Unknown
  Description of Unknown: gRNA target site sequence
aaagcctttggactccaactaaagat

SEQ ID NO: 12585 - DNA, 26 bp, Unknown
  Description of Unknown: gRNA target site sequence
atgatctgcccagtcacactgttagt

SEQ ID NO: 12586 - DNA, 26 bp, Unknown
  Description of Unknown: gRNA target site sequence
attcacccccactgaaaaagatgagt

SEQ ID NO: 12587 - DNA, 26 bp, Unknown
  Description of Unknown: gRNA target site sequence
tcaggcaccaagtgtttacatttggt

SEQ ID NO: 12588 - DNA, 26 bp, Unknown
  Description of Unknown: gRNA target site sequence
tgtctataaatagtcctcaggacagt

SEQ ID NO: 12589 - DNA, 26 bp, Unknown
  Description of Unknown: gRNA target site sequence
tcctgttatattctagaacagggaat

SEQ ID NO: 12590 - DNA, 26 bp, Unknown
  Description of Unknown: gRNA target site sequence
aggggataaatggcagcaatcgagat

SEQ ID NO: 12591 - DNA, 26 bp, Unknown
  Description of Unknown: gRNA target site sequence
ccctgttctagaatataacaggagat

SEQ ID NO: 12592 - DNA, 26 bp, Unknown
  Description of Unknown: gRNA target site sequence
tccaatttacatactctgcttagaat

SEQ ID NO: 12593 - DNA, 26 bp, Unknown
  Description of Unknown: gRNA target site sequence
ctcaaacagagagttccaggcaggat

SEQ ID NO: 12594 - DNA, 26 bp, Unknown
  Description of Unknown: gRNA target site sequence
agacatgtaagcagcatcatggaggt

SEQ ID NO: 12595 - DNA, 26 bp, Unknown
  Description of Unknown: gRNA target site sequence
ttgccagctcttgtatgcatttaggt

SEQ ID NO: 12596 - DNA, 26 bp, Unknown
  Description of Unknown: gRNA target site sequence
tcagagcgccgaggttgggggagggt

SEQ ID NO: 12597 - DNA, 26 bp, Unknown
  Description of Unknown: gRNA target site sequence
ttattatctgaggttcctaagtggat

SEQ ID NO: 12598 - DNA, 26 bp, Unknown
  Description of Unknown: gRNA target site sequence
gaaacttaattacacaggggataaat

SEQ ID NO: 12599 - DNA, 26 bp, Unknown
  Description of Unknown: gRNA target site sequence
atacacttatattcagggtacatgat

SEQ ID NO: 12600 - DNA, 26 bp, Unknown
  Description of Unknown: gRNA target site sequence
aaaaaggtgatctacacagtagaaat

SEQ ID NO: 12601 - DNA, 26 bp, Unknown
  Description of Unknown: gRNA target site sequence
tagacacttcatacagtttagaaaat

SEQ ID NO: 12602 - DNA, 26 bp, Unknown
  Description of Unknown: gRNA target site sequence
ggaatgttcttaaagatcagattagt

SEQ ID NO: 12603 - DNA, 26 bp, Unknown
  Description of Unknown: gRNA target site sequence
agagataacacatcaagttttatgat

SEQ ID NO: 12604 - DNA, 26 bp, Unknown
  Description of Unknown: gRNA target site sequence
ggtattgcaggataaaggcaggtggt

SEQ ID NO: 12605 - DNA, 26 bp, Unknown
  Description of Unknown: gRNA target site sequence
ctgtcacatgcattactccatttgat

SEQ ID NO: 12606 - DNA, 26 bp, Unknown
  Description of Unknown: gRNA target site sequence
cattccttaacacatcactcaagagt

SEQ ID NO: 12607 - DNA, 26 bp, Unknown
  Description of Unknown: gRNA target site sequence
gatcatgttttgccagaggaaaaggt

SEQ ID NO: 12608 - DNA, 26 bp, Unknown
  Description of Unknown: gRNA target site sequence
tgctgtgcatcagtatctcagcaggt

SEQ ID NO: 12609 - DNA, 26 bp, Unknown
  Description of Unknown: gRNA target site sequence
catgtgactttgtcacagcccaagat

SEQ ID NO: 12610 - DNA, 26 bp, Unknown
  Description of Unknown: gRNA target site sequence
acacagtccccatacaggaatgggat

SEQ ID NO: 12611 - DNA, 26 bp, Unknown
  Description of Unknown: gRNA target site sequence
tgaaaaaaatcaggtcttcattagat

SEQ ID NO: 12612 - DNA, 26 bp, Unknown
  Description of Unknown: gRNA target site sequence
taaggcatggttgtggttaatctggt

SEQ ID NO: 12613 - DNA, 26 bp, Unknown
  Description of Unknown: gRNA target site sequence
tagcctccaggccagaaagagagagt

SEQ ID NO: 12614 - DNA, 26 bp, Unknown
  Description of Unknown: gRNA target site sequence
ttagctcatgaaattaggtacaaagt

SEQ ID NO: 12615 - DNA, 26 bp, Unknown
  Description of Unknown: gRNA target site sequence
acttgtctaatttctactgtgtagat

SEQ ID NO: 12616 - DNA, 26 bp, Unknown
  Description of Unknown: gRNA target site sequence
ggagtccaaaggcttttcaatgaaat

SEQ ID NO: 12617 - DNA, 26 bp, Unknown
  Description of Unknown: gRNA target site sequence
ctttgaaaagtatcttggggccaaat

SEQ ID NO: 12618 - DNA, 26 bp, Unknown
  Description of Unknown: gRNA target site sequence
actctgcttagaatttgggggaaaat

SEQ ID NO: 12619 - DNA, 26 bp, Unknown
  Description of Unknown: gRNA target site sequence
gaggacaagtatcagacaggctgggt

SEQ ID NO: 12620 - DNA, 26 bp, Unknown
  Description of Unknown: gRNA target site sequence
gatctttaagaacattccctgacaat

SEQ ID NO: 12621 - DNA, 26 bp, Unknown
  Description of Unknown: gRNA target site sequence
tatggtattgcaggataaaggcaggt

SEQ ID NO: 12622 - DNA, 26 bp, Unknown
  Description of Unknown: gRNA target site sequence
taagaacattccctgacaatcccaat

SEQ ID NO: 12623 - DNA, 26 bp, Unknown
  Description of Unknown: gRNA target site sequence
gctgctgaaagttgtgtatgagtagt

SEQ ID NO: 12624 - DNA, 26 bp, Unknown
  Description of Unknown: gRNA target site sequence
ccaaattctaagcagagtatgtaaat

SEQ ID NO: 12625 - DNA, 26 bp, Unknown
  Description of Unknown: gRNA target site sequence
aacaaaggcctataccttcttgagat

SEQ ID NO: 12626 - DNA, 26 bp, Unknown
  Description of Unknown: gRNA target site sequence
gggagagcatcaggaaggtggatgat

SEQ ID NO: 12627 - DNA, 26 bp, Unknown
  Description of Unknown: gRNA target site sequence
aatgacatctaacataaccagcaaat

SEQ ID NO: 12628 - DNA, 26 bp, Unknown
  Description of Unknown: gRNA target site sequence
tcaaacatggagacagcactcaaagt

SEQ ID NO: 12629 - DNA, 26 bp, Unknown
  Description of Unknown: gRNA target site sequence
tttggccccaagatacttttcaaagt

SEQ ID NO: 12630 - DNA, 26 bp, Unknown
  Description of Unknown: gRNA target site sequence
gttcctttgccctctctgtagagggt

SEQ ID NO: 12631 - DNA, 26 bp, Unknown
  Description of Unknown: gRNA target site sequence
cttaactatcttaacaagctttgagt

SEQ ID NO: 12632 - DNA, 26 bp, Unknown
  Description of Unknown: gRNA target site sequence
gagctctttgcatctgagcttctaat

SEQ ID NO: 12633 - DNA, 26 bp, Unknown
  Description of Unknown: gRNA target site sequence
cccatcacatgtcacttttaaaaaat

SEQ ID NO: 12634 - DNA, 26 bp, Unknown
  Description of Unknown: gRNA target site sequence
agattacagtgatgctctcacaaaat

SEQ ID NO: 12635 - DNA, 26 bp, Unknown
  Description of Unknown: gRNA target site sequence
atttatttaacttgtggaacaaaaat

SEQ ID NO: 12636 - DNA, 26 bp, Unknown
  Description of Unknown: gRNA target site sequence
cttgggctgtgacaaagtcacatggt

SEQ ID NO: 12637 - DNA, 26 bp, Unknown
  Description of Unknown: gRNA target site sequence
tagtagcctttccttaatgatagggt

SEQ ID NO: 12638 - DNA, 26 bp, Unknown
  Description of Unknown: gRNA target site sequence
ctaaacatagaagttgcagtaaaaat

SEQ ID NO: 12639 - DNA, 26 bp, Unknown
  Description of Unknown: gRNA target site sequence
atcaggtcttcattagattccccaat

SEQ ID NO: 12640 - DNA, 26 bp, Unknown
  Description of Unknown: gRNA target site sequence
gggaacctctaagaggcaaacacagt

SEQ ID NO: 12641 - DNA, 26 bp, Unknown
  Description of Unknown: gRNA target site sequence
cactaacaggatatactctttataat

SEQ ID NO: 12642 - DNA, 26 bp, Unknown
  Description of Unknown: gRNA target site sequence
aacagattgttataacttgatataat

SEQ ID NO: 12643 - DNA, 26 bp, Unknown
  Description of Unknown: gRNA target site sequence
aagtctgaatgctccactttttcaat

SEQ ID NO: 12644 - DNA, 26 bp, Unknown
  Description of Unknown: gRNA target site sequence
actaaatatacagattgacactaaat

SEQ ID NO: 12645 - DNA, 26 bp, Unknown
  Description of Unknown: gRNA target site sequence
caaggtcaaaaacttacctccatgat

SEQ ID NO: 12646 - DNA, 26 bp, Unknown
  Description of Unknown: gRNA target site sequence
ccttcctgatgctctcccaaatcaat

SEQ ID NO: 12647 - DNA, 26 bp, Unknown
  Description of Unknown: gRNA target site sequence
aatgctgatatgatgttttggtcaat

SEQ ID NO: 12648 - DNA, 26 bp, Unknown
  Description of Unknown: gRNA target site sequence
actcatctttttcagtgggggtgaat

SEQ ID NO: 12649 - DNA, 26 bp, Unknown
  Description of Unknown: gRNA target site sequence
atgtaagcagcatcatggaggtaagt

SEQ ID NO: 12650 - DNA, 26 bp, Unknown
  Description of Unknown: gRNA target site sequence
cattataaagagtatatcctgttagt

SEQ ID NO: 12651 - DNA, 26 bp, Unknown
  Description of Unknown: gRNA target site sequence
tcccacttccccatggatggtctagt

SEQ ID NO: 12652 - DNA, 26 bp, Unknown
  Description of Unknown: gRNA target site sequence
cagaaagtactggagaagtccaggat

SEQ ID NO: 12653 - DNA, 26 bp, Unknown
  Description of Unknown: gRNA target site sequence
catgatcaaaacattctgctttcgat

SEQ ID NO: 12654 - DNA, 26 bp, Unknown
  Description of Unknown: gRNA target site sequence
gaaaataaaggggtaatagtgggagt

SEQ ID NO: 12655 - DNA, 26 bp, Unknown
  Description of Unknown: gRNA target site sequence
aatgagatctgcaatccaaataaaat

SEQ ID NO: 12656 - DNA, 26 bp, Unknown
  Description of Unknown: gRNA target site sequence
catgcattactccatttgatcataat

SEQ ID NO: 12657 - DNA, 26 bp, Unknown
  Description of Unknown: gRNA target site sequence
tactctgtcaatgttctccacatagt

SEQ ID NO: 12658 - DNA, 26 bp, Unknown
  Description of Unknown: gRNA target site sequence
gtgtatctaaacatagaagttgcagt

SEQ ID NO: 12659 - DNA, 26 bp, Unknown
  Description of Unknown: gRNA target site sequence
tctttttcagtgggggtgaattcagt

SEQ ID NO: 12660 - DNA, 26 bp, Unknown
  Description of Unknown: gRNA target site sequence
gcatttggattggatgaattccaaat

SEQ ID NO: 12661 - DNA, 26 bp, Unknown
  Description of Unknown: gRNA target site sequence
aagagctggcaaataccttaaatggt

SEQ ID NO: 12662 - DNA, 26 bp, Unknown
  Description of Unknown: gRNA target site sequence
gtgatgtgttaaggaatgctatgagt

SEQ ID NO: 12663 - DNA, 26 bp, Unknown
  Description of Unknown: gRNA target site sequence
aatagtgggagtgagatataagagat

SEQ ID NO: 12664 - DNA, 26 bp, Unknown
  Description of Unknown: gRNA target site sequence
gtttcagaaacagtactttccaaaat

SEQ ID NO: 12665 - DNA, 26 bp, Unknown
  Description of Unknown: gRNA target site sequence
taactcctctcttctgtctgaagaat

SEQ ID NO: 12666 - DNA, 26 bp, Unknown
  Description of Unknown: gRNA target site sequence
aactaaagatgcagagaagtccaagt

SEQ ID NO: 12667 - DNA, 26 bp, Unknown
  Description of Unknown: gRNA target site sequence
agaaagatcaaagccttgcaggtaat

SEQ ID NO: 12668 - DNA, 26 bp, Unknown
  Description of Unknown: gRNA target site sequence
tctgcatattgggattgtcagggaat

SEQ ID NO: 12669 - DNA, 26 bp, Unknown
  Description of Unknown: gRNA target site sequence
tgagaaatgcttacacaaacctaggt

SEQ ID NO: 12670 - DNA, 26 bp, Unknown
  Description of Unknown: gRNA target site sequence
caccaccattactggtatttgctggt

SEQ ID NO: 12671 - DNA, 26 bp, Unknown
  Description of Unknown: gRNA target site sequence
gaggaaaatagaccttcagaggcaat

SEQ ID NO: 12672 - DNA, 26 bp, Unknown
  Description of Unknown: gRNA target site sequence
attggggaatctaatgaagacctgat

SEQ ID NO: 12673 - DNA, 26 bp, Unknown
  Description of Unknown: gRNA target site sequence
gtttttgttttactgtgggcataaat

SEQ ID NO: 12674 - DNA, 26 bp, Unknown
  Description of Unknown: gRNA target site sequence
catggagacagcactcaaagtagaat

SEQ ID NO: 12675 - DNA, 26 bp, Unknown
  Description of Unknown: gRNA target site sequence
gtatagaggaattatgagggaaagat

SEQ ID NO: 12676 - DNA, 26 bp, Unknown
  Description of Unknown: gRNA target site sequence
tggcggaagataactgttttcaaaat

SEQ ID NO: 12677 - DNA, 26 bp, Unknown
  Description of Unknown: gRNA target site sequence
ggaattatgagggaaagataccaagt

SEQ ID NO: 12678 - DNA, 26 bp, Unknown
  Description of Unknown: gRNA target site sequence
gaatttggaattcatccaatccaaat

SEQ ID NO: 12679 - DNA, 26 bp, Unknown
  Description of Unknown: gRNA target site sequence
tacaagagctggcaaataccttaaat

SEQ ID NO: 12680 - DNA, 26 bp, Unknown
  Description of Unknown: gRNA target site sequence
agtgcaagagattgaagagttcaaat

SEQ ID NO: 12681 - DNA, 26 bp, Unknown
  Description of Unknown: gRNA target site sequence
tttcctgaattgctatgtgtctgggt

SEQ ID NO: 12682 - DNA, 26 bp, Unknown
  Description of Unknown: gRNA target site sequence
acattgaagttgacttactgaagaat

SEQ ID NO: 12683 - DNA, 26 bp, Unknown
  Description of Unknown: gRNA target site sequence
attttagacatttgttagtacatggt

SEQ ID NO: 12684 - DNA, 26 bp, Unknown
  Description of Unknown: gRNA target site sequence
tcctcaggtactccaaagattcaggt

SEQ ID NO: 12685 - DNA, 26 bp, Unknown
  Description of Unknown: gRNA target site sequence
caattccatttccactctggccaaat

SEQ ID NO: 12686 - DNA, 26 bp, Unknown
  Description of Unknown: gRNA target site sequence
ggacatctctgctgaggagagaaaat

SEQ ID NO: 12687 - DNA, 26 bp, Unknown
  Description of Unknown: gRNA target site sequence
ggacagaacatactttccattatgat

SEQ ID NO: 12688 - DNA, 26 bp, Unknown
  Description of Unknown: gRNA target site sequence
ttgcgttttaattagcatccacaggt

SEQ ID NO: 12689 - DNA, 26 bp, Unknown
  Description of Unknown: gRNA target site sequence
aagtgaaataccctggcaatattaat

SEQ ID NO: 12690 - DNA, 26 bp, Unknown
  Description of Unknown: gRNA target site sequence
acagagagggcaaaggaactgccagt

SEQ ID NO: 12691 - DNA, 26 bp, Unknown
  Description of Unknown: gRNA target site sequence
cccaaatcaattccctgttctagaat

SEQ ID NO: 12692 - DNA, 26 bp, Unknown
  Description of Unknown: gRNA target site sequence
ctttgccctctctgtagagggtcagt

SEQ ID NO: 12693 - DNA, 26 bp, Unknown
  Description of Unknown: gRNA target site sequence
cataccttgggttggttgggcacggt

SEQ ID NO: 12694 - DNA, 26 bp, Unknown
  Description of Unknown: gRNA target site sequence
atgtaatgatgattgcctctgaaggt

SEQ ID NO: 12695 - DNA, 26 bp, Unknown
  Description of Unknown: gRNA target site sequence
acgtggcagatgttattatctgaggt

SEQ ID NO: 12696 - DNA, 26 bp, Unknown
  Description of Unknown: gRNA target site sequence
atgcacagcatggtttctgaaccagt

SEQ ID NO: 12697 - DNA, 26 bp, Unknown
  Description of Unknown: gRNA target site sequence
aagtgtaagtgtataagcatatcaat

SEQ ID NO: 12698 - DNA, 26 bp, Unknown
  Description of Unknown: gRNA target site sequence
gtgacttggtatctttccctcataat

SEQ ID NO: 12699 - DNA, 26 bp, Unknown
  Description of Unknown: gRNA target site sequence
aaacagagtacaataacatgagtaat

SEQ ID NO: 12700 - DNA, 26 bp, Unknown
  Description of Unknown: gRNA target site sequence
agaaaagaaaaaggttagcaatgaat

SEQ ID NO: 12701 - DNA, 26 bp, Unknown
  Description of Unknown: gRNA target site sequence
tcaagaggtggattggggaatctaat

SEQ ID NO: 12702 - DNA, 26 bp, Unknown
  Description of Unknown: gRNA target site sequence
gagggcaaaggaactgccagtatggt

SEQ ID NO: 12703 - DNA, 26 bp, Unknown
  Description of Unknown: gRNA target site sequence
aaaaaaataaagaacataccttgggt

SEQ ID NO: 12704 - DNA, 26 bp, Unknown
  Description of Unknown: gRNA target site sequence
ctatttatagacagctctaacatgat

SEQ ID NO: 12705 - DNA, 26 bp, Unknown
  Description of Unknown: gRNA target site sequence
cctatccctgttgtattttatcgggt

SEQ ID NO: 12706 - DNA, 26 bp, Unknown
  Description of Unknown: gRNA target site sequence
gcagggaaagaagaatcctacagggt

SEQ ID NO: 12707 - DNA, 26 bp, Unknown
  Description of Unknown: gRNA target site sequence
tggatgaaacccagacacatagcaat

SEQ ID NO: 12708 - DNA, 26 bp, Unknown
  Description of Unknown: gRNA target site sequence
aagcttccaaaacttaactgaaaaat

SEQ ID NO: 12709 - DNA, 26 bp, Unknown
  Description of Unknown: gRNA target site sequence
ccaggtacttagaaagtgctcaagat

SEQ ID NO: 12710 - DNA, 26 bp, Unknown
  Description of Unknown: gRNA target site sequence
ccctgtgtaattaagtttcttaaaat

SEQ ID NO: 12711 - DNA, 26 bp, Unknown
  Description of Unknown: gRNA target site sequence
gagtacaataacatgagtaatttgat

SEQ ID NO: 12712 - DNA, 26 bp, Unknown
  Description of Unknown: gRNA target site sequence
aacaaaaaaggcatgtatagaggaat

SEQ ID NO: 12713 - DNA, 26 bp, Unknown
  Description of Unknown: gRNA target site sequence
aacaagccacctccattttgaagaat

SEQ ID NO: 12714 - DNA, 26 bp, Unknown
  Description of Unknown: gRNA target site sequence
tgctcaactgcagggaaactactggt

SEQ ID NO: 12715 - DNA, 26 bp, Unknown
  Description of Unknown: gRNA target site sequence
tcgatgaccaaatgtaaacacttggt

SEQ ID NO: 12716 - DNA, 26 bp, Unknown
  Description of Unknown: gRNA target site sequence
cattatcctttatgttgtaaataaat

SEQ ID NO: 12717 - DNA, 26 bp, Unknown
  Description of Unknown: gRNA target site sequence
ccagagatcttgagcactttctaagt

SEQ ID NO: 12718 - DNA, 26 bp, Unknown
  Description of Unknown: gRNA target site sequence
aggaggagtagctgccttttagtgat

SEQ ID NO: 12719 - DNA, 26 bp, Unknown
  Description of Unknown: gRNA target site sequence
gaactgagaaatgaactttgaaaagt

SEQ ID NO: 12720 - DNA, 26 bp, Unknown
  Description of Unknown: gRNA target site sequence
gtcctgctgtcctagcatcctataat

SEQ ID NO: 12721 - DNA, 26 bp, Unknown
  Description of Unknown: gRNA target site sequence
tagcagtatcttctgtcactggagat

SEQ ID NO: 12722 - DNA, 26 bp, Unknown
  Description of Unknown: gRNA target site sequence
tgtttcttgtggtatcttccagaaat

SEQ ID NO: 12723 - DNA, 26 bp, Unknown
  Description of Unknown: gRNA target site sequence
gtttagaaaatcagatgggtgtagat

SEQ ID NO: 12724 - DNA, 26 bp, Unknown
  Description of Unknown: gRNA target site sequence
ttagtggcacctgctgagatactgat

SEQ ID NO: 12725 - DNA, 26 bp, Unknown
  Description of Unknown: gRNA target site sequence
tcaatgaaaaatatagagtttataat

SEQ ID NO: 12726 - DNA, 26 bp, Unknown
  Description of Unknown: gRNA target site sequence
ttcttcatctgtgagaggcagaagat

SEQ ID NO: 12727 - DNA, 26 bp, Unknown
  Description of Unknown: gRNA target site sequence
tccattctctgctggatgacgtgagt

SEQ ID NO: 12728 - DNA, 26 bp, Unknown
  Description of Unknown: gRNA target site sequence
ttatgcacaaaatgtagggttataat

SEQ ID NO: 12729 - DNA, 26 bp, Unknown
  Description of Unknown: gRNA target site sequence
tgcagattgtttatatcagatgggat

SEQ ID NO: 12730 - DNA, 26 bp, Unknown
  Description of Unknown: gRNA target site sequence
atgtatatatcaccaccattactggt

SEQ ID NO: 12731 - DNA, 26 bp, Unknown
  Description of Unknown: gRNA target site sequence
ctctttgcatctgagcttctaataat

SEQ ID NO: 12732 - DNA, 26 bp, Unknown
  Description of Unknown: gRNA target site sequence
tgcaaagagctctcttagcttttaat

SEQ ID NO: 12733 - DNA, 26 bp, Unknown
  Description of Unknown: gRNA target site sequence
aactctccaaaagtcataaagccagt

SEQ ID NO: 12734 - DNA, 26 bp, Unknown
  Description of Unknown: gRNA target site sequence
ccctgctaaaatgttactctgtcaat

SEQ ID NO: 12735 - DNA, 26 bp, Unknown
  Description of Unknown: gRNA target site sequence
gacttactgaagaatggagagagaat

SEQ ID NO: 12736 - DNA, 26 bp, Unknown
  Description of Unknown: gRNA target site sequence
gaatttattttatttggattgcagat

SEQ ID NO: 12737 - DNA, 26 bp, Unknown
  Description of Unknown: gRNA target site sequence
aattaggtacaaagtcagagaggggt

SEQ ID NO: 12738 - DNA, 26 bp, Unknown
  Description of Unknown: gRNA target site sequence
ttgatcatgagaaaattgcatttaat

SEQ ID NO: 12739 - DNA, 26 bp, Unknown
  Description of Unknown: gRNA target site sequence
actagaggagataaagggaaacagat

SEQ ID NO: 12740 - DNA, 26 bp, Unknown
  Description of Unknown: gRNA target site sequence
atctgattttctaaactgtatgaagt

SEQ ID NO: 12741 - DNA, 26 bp, Unknown
  Description of Unknown: gRNA target site sequence
gagaggcagaagataaccatagtagt

SEQ ID NO: 12742 - DNA, 26 bp, Unknown
  Description of Unknown: gRNA target site sequence
gaaataaagaggttttgttgtttggt

SEQ ID NO: 12743 - DNA, 26 bp, Unknown
  Description of Unknown: gRNA target site sequence
tcctggctctacaatttactaacagt

SEQ ID NO: 12744 - DNA, 26 bp, Unknown
  Description of Unknown: gRNA target site sequence
ttttaaaataccatgtactaacaaat

SEQ ID NO: 12745 - DNA, 26 bp, Unknown
  Description of Unknown: gRNA target site sequence
gaacatactttccattatgatcaaat

SEQ ID NO: 12746 - DNA, 26 bp, Unknown
  Description of Unknown: gRNA target site sequence
gtgctctgatccctgaggcatttaat

SEQ ID NO: 12747 - DNA, 26 bp, Unknown
  Description of Unknown: gRNA target site sequence
atgtctcgatctatgaaaaagacagt

SEQ ID NO: 12748 - DNA, 26 bp, Unknown
  Description of Unknown: gRNA target site sequence
acttctccagtactttctggctggat

SEQ ID NO: 12749 - DNA, 26 bp, Unknown
  Description of Unknown: gRNA target site sequence
taaatatgaatcttatatgacaaaat

SEQ ID NO: 12750 - DNA, 26 bp, Unknown
  Description of Unknown: gRNA target site sequence
acattcttttgtaagctgctgaaagt

SEQ ID NO: 12751 - DNA, 26 bp, Unknown
  Description of Unknown: gRNA target site sequence
ctccagtactttctggctggattggt

SEQ ID NO: 12752 - DNA, 26 bp, Unknown
  Description of Unknown: gRNA target site sequence
ggaagataccacaagaaacatgtaat

SEQ ID NO: 12753 - DNA, 26 bp, Unknown
  Description of Unknown: gRNA target site sequence
taagctgctgaaagttgtgtatgagt

SEQ ID NO: 12754 - DNA, 26 bp, Unknown
  Description of Unknown: gRNA target site sequence
gctctttgcctggttgtttccaagat

SEQ ID NO: 12755 - DNA, 26 bp, Unknown
  Description of Unknown: gRNA target site sequence
tttccattatgatcaaatggagtaat

SEQ ID NO: 12756 - DNA, 26 bp, Unknown
  Description of Unknown: gRNA target site sequence
attaaatgacgcaaagcacataaagt

SEQ ID NO: 12757 - DNA, 26 bp, Unknown
  Description of Unknown: gRNA target site sequence
gaaggtataggcctttgtttgtaagt

SEQ ID NO: 12758 - DNA, 26 bp, Unknown
  Description of Unknown: gRNA target site sequence
tcatatttacttcttatacatttgat

SEQ ID NO: 12759 - DNA, 26 bp, Unknown
  Description of Unknown: gRNA target site sequence
aaccagcaaataccagtaatggtggt

SEQ ID NO: 12760 - DNA, 26 bp, Unknown
  Description of Unknown: gRNA target site sequence
gcatactcatctttttcagtgggggt

SEQ ID NO: 12761 - DNA, 26 bp, Unknown
  Description of Unknown: gRNA target site sequence
cttgatataatgatactataatagat

SEQ ID NO: 12762 - DNA, 26 bp, Unknown
  Description of Unknown: gRNA target site sequence
ccaaatgtaaacacttggtgcctgat

SEQ ID NO: 12763 - DNA, 26 bp, Unknown
  Description of Unknown: gRNA target site sequence
cccctcatgttttcaaaaccgaaagt

SEQ ID NO: 12764 - DNA, 26 bp, Unknown
  Description of Unknown: gRNA target site sequence
atgagggaaagataccaagtcacggt

SEQ ID NO: 12765 - DNA, 26 bp, Unknown
  Description of Unknown: gRNA target site sequence
tagctctaaacaatgtattcatgggt

SEQ ID NO: 12766 - DNA, 26 bp, Unknown
  Description of Unknown: gRNA target site sequence
ttcttgtggtatcttccagaaatggt

SEQ ID NO: 12767 - DNA, 26 bp, Unknown
  Description of Unknown: gRNA target site sequence
ttgttttttagctcatgaaattaggt

SEQ ID NO: 12768 - DNA, 26 bp, Unknown
  Description of Unknown: gRNA target site sequence
gcttcctctttggctctttgcctggt

SEQ ID NO: 12769 - DNA, 26 bp, Unknown
  Description of Unknown: gRNA target site sequence
ttggtaagaacataccttgggttggt

SEQ ID NO: 12770 - DNA, 26 bp, Unknown
  Description of Unknown: gRNA target site sequence
caggattattggaaatttgttataat

SEQ ID NO: 12771 - DNA, 26 bp, Unknown
  Description of Unknown: gRNA target site sequence
aagaattttatacacatatatttagt

SEQ ID NO: 12772 - DNA, 26 bp, Unknown
  Description of Unknown: gRNA target site sequence
aagatgttgatgttggataagagaat

SEQ ID NO: 12773 - DNA, 26 bp, Unknown
  Description of Unknown: gRNA target site sequence
cagcgcagctggagtgggggacgggt

SEQ ID NO: 12774 - DNA, 26 bp, Unknown
  Description of Unknown: gRNA target site sequence
ggggactgtgtttgcctcttagaggt

SEQ ID NO: 12775 - DNA, 26 bp, Unknown
  Description of Unknown: gRNA target site sequence
ccacacacaggtcagaggaggaaaat

SEQ ID NO: 12776 - DNA, 26 bp, Unknown
  Description of Unknown: gRNA target site sequence
actcaaagtagaattataaagaagat

SEQ ID NO: 12777 - DNA, 26 bp, Unknown
  Description of Unknown: gRNA target site sequence
cagtgacagaagatactgctagaaat

SEQ ID NO: 12778 - DNA, 26 bp, Unknown
  Description of Unknown: gRNA target site sequence
ttatcctgcaataccatactggcagt

SEQ ID NO: 12779 - DNA, 26 bp, Unknown
  Description of Unknown: gRNA target site sequence
taaagctgctttgatataaaaaaggt

SEQ ID NO: 12780 - DNA, 26 bp, Unknown
  Description of Unknown: gRNA target site sequence
tataataatgttaacatggacatgat

SEQ ID NO: 12781 - DNA, 26 bp, Unknown
  Description of Unknown: gRNA target site sequence
gtgttagtgctactaaatatacagat

SEQ ID NO: 12782 - DNA, 26 bp, Unknown
  Description of Unknown: gRNA target site sequence
caaattctgcttgcttgctttttaat

SEQ ID NO: 12783 - DNA, 26 bp, Unknown
  Description of Unknown: gRNA target site sequence
tggaatgagattccatcccaaaaaat

SEQ ID NO: 12784 - DNA, 26 bp, Unknown
  Description of Unknown: gRNA target site sequence
taagattttgggagcaccaaagggat

SEQ ID NO: 12785 - DNA, 26 bp, Unknown
  Description of Unknown: gRNA target site sequence
ccaaggagaacttggagaagggaagt

SEQ ID NO: 12786 - DNA, 26 bp, Unknown
  Description of Unknown: gRNA target site sequence
taggattcttctttccctgctaaaat

SEQ ID NO: 12787 - DNA, 26 bp, Unknown
  Description of Unknown: gRNA target site sequence
atcaaagccttgcaggtaatgtgggt

SEQ ID NO: 12788 - DNA, 26 bp, Unknown
  Description of Unknown: gRNA target site sequence
gccaccgtgcccaaccaacccaaggt

SEQ ID NO: 12789 - DNA, 26 bp, Unknown
  Description of Unknown: gRNA target site sequence
gttatattctagaacagggaattgat

SEQ ID NO: 12790 - DNA, 26 bp, Unknown
  Description of Unknown: gRNA target site sequence
cacagtagaaattagacaagtttggt

SEQ ID NO: 12791 - DNA, 26 bp, Unknown
  Description of Unknown: gRNA target site sequence
atgttcttattattagaagctcagat

SEQ ID NO: 12792 - DNA, 26 bp, Unknown
  Description of Unknown: gRNA target site sequence
taaaacctcagcagaaataaagaggt

SEQ ID NO: 12793 - DNA, 26 bp, Unknown
  Description of Unknown: gRNA target site sequence
taatcttttctaagaagaggacaagt

SEQ ID NO: 12794 - DNA, 26 bp, Unknown
  Description of Unknown: gRNA target site sequence
ttaagaaacttaattacacaggggat

SEQ ID NO: 12795 - DNA, 26 bp, Unknown
  Description of Unknown: gRNA target site sequence
tcagggaatgttcttaaagatcagat

SEQ ID NO: 12796 - DNA, 26 bp, Unknown
  Description of Unknown: gRNA target site sequence
tttactaacagtgtgactgggcagat

SEQ ID NO: 12797 - DNA, 26 bp, Unknown
  Description of Unknown: gRNA target site sequence
ctcttgcttctggagctccttgtagt

SEQ ID NO: 12798 - DNA, 26 bp, Unknown
  Description of Unknown: gRNA target site sequence
aacaggatatactctttataatgggt

SEQ ID NO: 12799 - DNA, 26 bp, Unknown
  Description of Unknown: gRNA target site sequence
ctctagcttttgtggcagcttcaggt

SEQ ID NO: 12800 - DNA, 26 bp, Unknown
  Description of Unknown: gRNA target site sequence
agattgttataacttgatataatgat

SEQ ID NO: 12801 - DNA, 26 bp, Unknown
  Description of Unknown: gRNA target site sequence
cttcccttctccaagttctccttggt

SEQ ID NO: 12802 - DNA, 26 bp, Unknown
  Description of Unknown: gRNA target site sequence
catcaatgtaccctgggcagtagaat

SEQ ID NO: 12803 - DNA, 26 bp, Unknown
  Description of Unknown: gRNA target site sequence
ggtgtttctagagagatatatctggt

SEQ ID NO: 12804 - DNA, 26 bp, Unknown
  Description of Unknown: gRNA target site sequence
atacacttacactttatgcacaaaat

SEQ ID NO: 12805 - DNA, 26 bp, Unknown
  Description of Unknown: gRNA target site sequence
aagccagtaactggttgagcccaaat

SEQ ID NO: 12806 - DNA, 26 bp, Unknown
  Description of Unknown: gRNA target site sequence
atctggtttatttttgttccacaagt

SEQ ID NO: 12807 - DNA, 26 bp, Unknown
  Description of Unknown: gRNA target site sequence
aaaagacacattaatattgccagggt

SEQ ID NO: 12808 - DNA, 26 bp, Unknown
  Description of Unknown: gRNA target site sequence
ctaagcagagtatgtaaattggaagt

SEQ ID NO: 12809 - DNA, 26 bp, Unknown
  Description of Unknown: gRNA target site sequence
cttatgtttatgcctttctttttggt

SEQ ID NO: 12810 - DNA, 26 bp, Unknown
  Description of Unknown: gRNA target site sequence
ggaagcttaaataactctccaaaagt

SEQ ID NO: 12811 - DNA, 26 bp, Unknown
  Description of Unknown: gRNA target site sequence
atcttctttataattctactttgagt

SEQ ID NO: 12812 - DNA, 26 bp, Unknown
  Description of Unknown: gRNA target site sequence
ttgcactcaaagcttgttaagatagt

SEQ ID NO: 12813 - DNA, 26 bp, Unknown
  Description of Unknown: gRNA target site sequence
tttcctcctctgacctgtgtgtgggt

SEQ ID NO: 12814 - DNA, 26 bp, Unknown
  Description of Unknown: gRNA target site sequence
taccacaagaaacatgtaatgatgat

SEQ ID NO: 12815 - DNA, 26 bp, Unknown
  Description of Unknown: gRNA target site sequence
atataattgacaggattattggaaat

SEQ ID NO: 12816 - DNA, 26 bp, Unknown
  Description of Unknown: gRNA target site sequence
aaaagtgacatgtgatgggaacaaat

SEQ ID NO: 12817 - DNA, 26 bp, Unknown
  Description of Unknown: gRNA target site sequence
gtatcattatatcaagttataacaat

SEQ ID NO: 12818 - DNA, 26 bp, Unknown
  Description of Unknown: gRNA target site sequence
caccttttcctctggcaaaacatgat

SEQ ID NO: 12819 - DNA, 26 bp, Unknown
  Description of Unknown: gRNA target site sequence
agataccacaagaaacatgtaatgat

SEQ ID NO: 12820 - DNA, 26 bp, Unknown
  Description of Unknown: gRNA target site sequence
tagtcatgcctctcattttggaaagt

SEQ ID NO: 12821 - DNA, 26 bp, Unknown
  Description of Unknown: gRNA target site sequence
tattttcttcccacttccccatggat

SEQ ID NO: 12822 - DNA, 26 bp, Unknown
  Description of Unknown: gRNA target site sequence
gaattctctgctccccacctctaagt

SEQ ID NO: 12823 - DNA, 26 bp, Unknown
  Description of Unknown: gRNA target site sequence
atacttgtcctcttcttagaaaagat

SEQ ID NO: 12824 - DNA, 26 bp, Unknown
  Description of Unknown: gRNA target site sequence
cctttattttcaaacagggaaacagt

SEQ ID NO: 12825 - DNA, 26 bp, Unknown
  Description of Unknown: gRNA target site sequence
gatataaacaatctgcatattgggat

SEQ ID NO: 12826 - DNA, 26 bp, Unknown
  Description of Unknown: gRNA target site sequence
ttttaaaagaagtagctgcagacagt

SEQ ID NO: 12827 - DNA, 26 bp, Unknown
  Description of Unknown: gRNA target site sequence
agagtggaaatggaattgggagaaat

SEQ ID NO: 12828 - DNA, 26 bp, Unknown
  Description of Unknown: gRNA target site sequence
atttttgttccacaagttaaataaat

SEQ ID NO: 12829 - DNA, 26 bp, Unknown
  Description of Unknown: gRNA target site sequence
atctaacataaccagcaaataccagt

SEQ ID NO: 12830 - DNA, 26 bp, Unknown
  Description of Unknown: gRNA target site sequence
tagaatttgggggaaaatttagaaat

SEQ ID NO: 12831 - DNA, 26 bp, Unknown
  Description of Unknown: gRNA target site sequence
aaataaagaacataccttgggttgat

SEQ ID NO: 12832 - DNA, 26 bp, Unknown
  Description of Unknown: gRNA target site sequence
aaccatcttggattatctttattaat

SEQ ID NO: 12833 - DNA, 26 bp, Unknown
  Description of Unknown: gRNA target site sequence
atccaacatcaacatcttggtcagat

SEQ ID NO: 12834 - DNA, 26 bp, Unknown
  Description of Unknown: gRNA target site sequence
ctgtttgaaaataaaggggtaatagt

SEQ ID NO: 12835 - DNA, 26 bp, Unknown
  Description of Unknown: gRNA target site sequence
gctcccaaaatcttagaagaaaaaat

SEQ ID NO: 12836 - DNA, 26 bp, Unknown
  Description of Unknown: gRNA target site sequence
gttcattttctctcctcagcagagat

SEQ ID NO: 12837 - DNA, 26 bp, Unknown
  Description of Unknown: gRNA target site sequence
cacggtttattcttcaaaatggaggt

SEQ ID NO: 12838 - DNA, 26 bp, Unknown
  Description of Unknown: gRNA target site sequence
agaatggaaagtcaaatttcctgaat

SEQ ID NO: 12839 - DNA, 26 bp, Unknown
  Description of Unknown: gRNA target site sequence
gtagtacaagagatagaaagaccagt

SEQ ID NO: 12840 - DNA, 26 bp, Unknown
  Description of Unknown: gRNA target site sequence
ttttactgcaacttctatgtttagat

SEQ ID NO: 12841 - DNA, 26 bp, Unknown
  Description of Unknown: gRNA target site sequence
tttcttcccacttccccatggatggt

SEQ ID NO: 12842 - DNA, 26 bp, Unknown
  Description of Unknown: gRNA target site sequence
gagatataagagataacacatcaagt

SEQ ID NO: 12843 - DNA, 26 bp, Unknown
  Description of Unknown: gRNA target site sequence
acaaaagctagaggaagccagtaggt

SEQ ID NO: 12844 - DNA, 26 bp, Unknown
  Description of Unknown: gRNA target site sequence
tactttccattatgatcaaatggagt

SEQ ID NO: 12845 - DNA, 26 bp, Unknown
  Description of Unknown: gRNA target site sequence
aacaaatttccaataatcctgtcaat

SEQ ID NO: 12846 - DNA, 26 bp, Unknown
  Description of Unknown: gRNA target site sequence
acttcatacagtttagaaaatcagat

SEQ ID NO: 12847 - DNA, 26 bp, Unknown
  Description of Unknown: gRNA target site sequence
atgtactaacaaatgtctaaaatggt

SEQ ID NO: 12848 - DNA, 26 bp, Unknown
  Description of Unknown: gRNA target site sequence
agtgtattgccaggtacttagaaagt

SEQ ID NO: 12849 - DNA, 26 bp, Unknown
  Description of Unknown: gRNA target site sequence
aagaatggagagagaattgaaaaagt

SEQ ID NO: 12850 - DNA, 26 bp, Unknown
  Description of Unknown: gRNA target site sequence
tttttatatcaaagcagctttatgat

SEQ ID NO: 12851 - DNA, 26 bp, Unknown
  Description of Unknown: gRNA target site sequence
ggcaggcgtttttcttaaaaaaaaat

SEQ ID NO: 12852 - DNA, 26 bp, Unknown
  Description of Unknown: gRNA target site sequence
aaaaaatgctgatatgatgttttggt

SEQ ID NO: 12853 - DNA, 26 bp, Unknown
  Description of Unknown: gRNA target site sequence
ctccagcctgggcaatggaatgagat

SEQ ID NO: 12854 - DNA, 26 bp, Unknown
  Description of Unknown: gRNA target site sequence
ttggtaatgagatctgcaatccaaat

SEQ ID NO: 12855 - DNA, 26 bp, Unknown
  Description of Unknown: gRNA target site sequence
tttttttctagcagatttctagcagt

SEQ ID NO: 12856 - DNA, 26 bp, Unknown
  Description of Unknown: gRNA target site sequence
aattctctctccattcttcagtaagt

SEQ ID NO: 12857 - DNA, 26 bp, Unknown
  Description of Unknown: gRNA target site sequence
ccatgcatagaccatttctggaagat

SEQ ID NO: 12858 - DNA, 26 bp, Unknown
  Description of Unknown: gRNA target site sequence
agatctgcaatccaaataaaataaat

SEQ ID NO: 12859 - DNA, 26 bp, Unknown
  Description of Unknown: gRNA target site sequence
ctgcttgcttgctttttaatattgat

SEQ ID NO: 12860 - DNA, 26 bp, Unknown
  Description of Unknown: gRNA target site sequence
gacttctctgcatctttagttggagt

SEQ ID NO: 12861 - DNA, 26 bp, Unknown
  Description of Unknown: gRNA target site sequence
ggtcatgttcccttctcctgtggagt

SEQ ID NO: 12862 - DNA, 26 bp, Unknown
  Description of Unknown: gRNA target site sequence
agggaaacagattgttataacttgat

SEQ ID NO: 12863 - DNA, 26 bp, Unknown
  Description of Unknown: gRNA target site sequence
ttgcgtcatttaattttgaaaacagt

SEQ ID NO: 12864 - DNA, 26 bp, Unknown
  Description of Unknown: gRNA target site sequence
attattggaaatttgttataatgaat

SEQ ID NO: 12865 - DNA, 26 bp, Unknown
  Description of Unknown: gRNA target site sequence
ctgtggatgctaattaaaacgcaaat

SEQ ID NO: 12866 - DNA, 26 bp, Unknown
  Description of Unknown: gRNA target site sequence
ctcttcttagaaaagattacagtgat

SEQ ID NO: 12867 - DNA, 26 bp, Unknown
  Description of Unknown: gRNA target site sequence
taacattttagcagggaaagaagaat

SEQ ID NO: 12868 - DNA, 26 bp, Unknown
  Description of Unknown: gRNA target site sequence
catccatggggaagtgggaagaaaat

SEQ ID NO: 12869 - DNA, 26 bp, Unknown
  Description of Unknown: gRNA target site sequence
catacagtttagaaaatcagatgggt

SEQ ID NO: 12870 - DNA, 26 bp, Unknown
  Description of Unknown: gRNA target site sequence
caatatgcagattgtttatatcagat

SEQ ID NO: 12871 - DNA, 26 bp, Unknown
  Description of Unknown: gRNA target site sequence
cctactacacgcataggctacatggt

SEQ ID NO: 12872 - DNA, 26 bp, Unknown
  Description of Unknown: gRNA target site sequence
tctagaatataacaggagatttgaat

SEQ ID NO: 12873 - DNA, 26 bp, Unknown
  Description of Unknown: gRNA target site sequence
ataacttgatataatgatactataat

SEQ ID NO: 12874 - DNA, 26 bp, Unknown
  Description of Unknown: gRNA target site sequence
cttactttatcaaatgtataagaagt

SEQ ID NO: 12875 - DNA, 26 bp, Unknown
  Description of Unknown: gRNA target site sequence
aaccattaataaagataatccaagat

SEQ ID NO: 12876 - DNA, 26 bp, Unknown
  Description of Unknown: gRNA target site sequence
acttctcttcattttcaatgaaaaat

SEQ ID NO: 12877 - DNA, 26 bp, Unknown
  Description of Unknown: gRNA target site sequence
aaactgtatgaagtgtctagtagagt

SEQ ID NO: 12878 - DNA, 26 bp, Unknown
  Description of Unknown: gRNA target site sequence
caatgtggaaatggcagaagaaagat

SEQ ID NO: 12879 - DNA, 26 bp, Unknown
  Description of Unknown: gRNA target site sequence
caaattaaatgcaattttctcatgat

SEQ ID NO: 12880 - DNA, 26 bp, Unknown
  Description of Unknown: gRNA target site sequence
ttctctcctcagcagagatgtccaat

SEQ ID NO: 12881 - DNA, 26 bp, Unknown
  Description of Unknown: gRNA target site sequence
catgtgatgggaacaaataagttaat

SEQ ID NO: 12882 - DNA, 26 bp, Unknown
  Description of Unknown: gRNA target site sequence
gctgagatactgatgcacagcatggt

SEQ ID NO: 12883 - DNA, 26 bp, Unknown
  Description of Unknown: gRNA target site sequence
ttgttagtacatggtattttaaaagt

SEQ ID NO: 12884 - DNA, 26 bp, Unknown
  Description of Unknown: gRNA target site sequence
tgccacaaaagctagaggaagccagt

SEQ ID NO: 12885 - DNA, 26 bp, Unknown
  Description of Unknown: gRNA target site sequence
tttgggggaaaatttagaaatataat

SEQ ID NO: 12886 - DNA, 26 bp, Unknown
  Description of Unknown: gRNA target site sequence
ttagcttttaatgttatgaaaaaaat

SEQ ID NO: 12887 - DNA, 26 bp, Unknown
  Description of Unknown: gRNA target site sequence
aaaaatggaaggggtggaaacagagt

SEQ ID NO: 12888 - DNA, 26 bp, Unknown
  Description of Unknown: gRNA target site sequence
aggtaagtttttgaccttgagaaaat

SEQ ID NO: 12889 - DNA, 26 bp, Unknown
  Description of Unknown: gRNA target site sequence
cattaataaagataatccaagatggt

SEQ ID NO: 12890 - DNA, 26 bp, Unknown
  Description of Unknown: gRNA target site sequence
gtgtagatcacctttttaaaagaagt

SEQ ID NO: 12891 - DNA, 26 bp, Unknown
  Description of Unknown: gRNA target site sequence
aagaacatattaaatgcctcagggat

SEQ ID NO: 12892 - DNA, 26 bp, Unknown
  Description of Unknown: gRNA target site sequence
ggcaccgagattttaagaaacttaat

SEQ ID NO: 12893 - DNA, 26 bp, Unknown
  Description of Unknown: gRNA target site sequence
attttcccccaaattctaagcagagt

SEQ ID NO: 12894 - DNA, 26 bp, Unknown
  Description of Unknown: gRNA target site sequence
tacactttatgcacaaaatgtagggt

SEQ ID NO: 12895 - DNA, 26 bp, Unknown
  Description of Unknown: gRNA target site sequence
tctattatagtatcattatatcaagt

SEQ ID NO: 12896 - DNA, 26 bp, Unknown
  Description of Unknown: gRNA target site sequence
agaagaaagatcaaagccttgcaggt

SEQ ID NO: 12897 - DNA, 26 bp, Unknown
  Description of Unknown: gRNA target site sequence
agtagaaattagacaagtttggtaat

SEQ ID NO: 12898 - DNA, 26 bp, Unknown
  Description of Unknown: gRNA target site sequence
caatgatggactgtatatatgacagt

SEQ ID NO: 12899 - DNA, 26 bp, Unknown
  Description of Unknown: gRNA target site sequence
tggaaatggaattgggagaaatcgat

SEQ ID NO: 12900 - DNA, 26 bp, Unknown
  Description of Unknown: gRNA target site sequence
catcttggattatctttattaatggt

SEQ ID NO: 12901 - DNA, 26 bp, Unknown
  Description of Unknown: gRNA target site sequence
tctgcagctacttcttttaaaaaggt

SEQ ID NO: 12902 - DNA, 26 bp, Unknown
  Description of Unknown: gRNA target site sequence
tactggctttatgacttttggagagt

SEQ ID NO: 12903 - DNA, 26 bp, Unknown
  Description of Unknown: gRNA target site sequence
tttcggttttgaaaacatgagggggt

SEQ ID NO: 12904 - DNA, 26 bp, Unknown
  Description of Unknown: gRNA target site sequence
aatcatcattacatgtttcttgtggt

SEQ ID NO: 12905 - DNA, 26 bp, Unknown
  Description of Unknown: gRNA target site sequence
ttattcttcagacagaagagaggagt

SEQ ID NO: 12906 - DNA, 26 bp, Unknown
  Description of Unknown: gRNA target site sequence
tttatacacatatatttagtgtcaat

SEQ ID NO: 12907 - DNA, 26 bp, Unknown
  Description of Unknown: gRNA target site sequence
cacacagaaagatgtcaataacgggt

SEQ ID NO: 12908 - DNA, 26 bp, Unknown
  Description of Unknown: gRNA target site sequence
caagcagaatttggaattcatccaat

SEQ ID NO: 12909 - DNA, 26 bp, Unknown
  Description of Unknown: gRNA target site sequence
cattgaaaatgaagagaagtgttagt

SEQ ID NO: 12910 - DNA, 26 bp, Unknown
  Description of Unknown: gRNA target site sequence
tgaaccactcttttcctttgtataat

SEQ ID NO: 12911 - DNA, 26 bp, Unknown
  Description of Unknown: gRNA target site sequence
gaatgaaacattttgtcatataagat

SEQ ID NO: 12912 - DNA, 26 bp, Unknown
  Description of Unknown: gRNA target site sequence
gtaattaagtttcttaaaatctcggt

SEQ ID NO: 12913 - DNA, 26 bp, Unknown
  Description of Unknown: gRNA target site sequence
ttcagttaagttttggaagcttaaat

SEQ ID NO: 12914 - DNA, 26 bp, Unknown
  Description of Unknown: gRNA target site sequence
gtactgtttctgaaacattaggcaat

SEQ ID NO: 12915 - DNA, 26 bp, Unknown
  Description of Unknown: gRNA target site sequence
atggttatcttctgcctctcacagat

SEQ ID NO: 12916 - DNA, 26 bp, Unknown
  Description of Unknown: gRNA target site sequence
atattgcctaatgtttcagaaacagt

SEQ ID NO: 12917 - DNA, 26 bp, Unknown
  Description of Unknown: gRNA target site sequence
caaatgtataagaagtaaatatgaat

SEQ ID NO: 12918 - DNA, 26 bp, Unknown
  Description of Unknown: gRNA target site sequence
tttcttttcttttcaggtttgaagat

SEQ ID NO: 12919 - DNA, 26 bp, Unknown
  Description of Unknown: gRNA target site sequence
atacatttgataaagtaaggcatggt

SEQ ID NO: 12920 - DNA, 26 bp, Unknown
  Description of Unknown: gRNA target site sequence
tttacttcttatacatttgataaagt

SEQ ID NO: 12921 - DNA, 26 bp, Unknown
  Description of Unknown: gRNA target site sequence
ctgtgggcataaattaatttttcagt

SEQ ID NO: 12922 - DNA, 26 bp, Unknown
  Description of Unknown: gRNA target site sequence
ggtagttcttataattttttaaaagt

SEQ ID NO: 12923 - DNA, 26 bp, Unknown
  Description of Unknown: gRNA target site sequence
tccttggcacacagaaagatgtcaat

SEQ ID NO: 12924 - DNA, 26 bp, Unknown
  Description of Unknown: gRNA target site sequence
tactccatttgatcataatggaaagt

SEQ ID NO: 12925 - DNA, 26 bp, Unknown
  Description of Unknown: gRNA target site sequence
ataaagtccttggcacacagaaagat

SEQ ID NO: 12926 - DNA, 26 bp, Unknown
  Description of Unknown: gRNA target site sequence
tgggtttgaatttgggctcaaccagt

SEQ ID NO: 12927 - DNA, 26 bp, Unknown
  Description of Unknown: gRNA target site sequence
taatcctgtcaattatatttctaaat

SEQ ID NO: 12928 - DNA, 26 bp, Unknown
  Description of Unknown: gRNA target site sequence
ggcataaattaatttttcagttaagt

SEQ ID NO: 12929 - DNA, 26 bp, Unknown
  Description of Unknown: gRNA target site sequence
gtttatttttgttccacaagttaaat

SEQ ID NO: 12930 - DNA, 26 bp, Unknown
  Description of Unknown: gRNA target site sequence
gtcctcttcttagaaaagattacagt

SEQ ID NO: 12931 - DNA, 26 bp, Unknown
  Description of Unknown: gRNA target site sequence
atccagcagagaatggaaagtcaaat

SEQ ID NO: 12932 - DNA, 26 bp, Unknown
  Description of Unknown: gRNA target site sequence
ctgaaaaattaatttatgcccacagt

SEQ ID NO: 12933 - DNA, 26 bp, Unknown
  Description of Unknown: gRNA target site sequence
tccatgtttgatgtatctgagcaggt

SEQ ID NO: 12934 - DNA, 26 bp, Unknown
  Description of Unknown: gRNA target site sequence
aaaagcaagcaagcagaatttggaat

SEQ ID NO: 12935 - DNA, 26 bp, Unknown
  Description of Unknown: gRNA target site sequence
gctgtaaaaccattaataaagataat

SEQ ID NO: 12936 - DNA, 26 bp, Unknown
  Description of Unknown: gRNA target site sequence
gtaaataaattgtattcaaattaaat

SEQ ID NO: 12937 - DNA, 26 bp, Unknown
  Description of Unknown: gRNA target site sequence
tccctgtttgaaaataaaggggtaat

SEQ ID NO: 12938 - DNA, 26 bp, Unknown
  Description of Unknown: gRNA target site sequence
atttttcattgaaaatgaagagaagt

SEQ ID NO: 12939 - DNA, 26 bp, Unknown
  Description of Unknown: gRNA target site sequence
tttttggttcctgctcctgccttgat

SEQ ID NO: 12940 - DNA, 26 bp, Unknown
  Description of Unknown: gRNA target site sequence
aacaaatgtctaaaatggttagaaat

SEQ ID NO: 12941 - DNA, 26 bp, Unknown
  Description of Unknown: gRNA target site sequence
caactttcagcagcttacaaaagaat

SEQ ID NO: 12942 - DNA, 26 bp, Unknown
  Description of Unknown: gRNA target site sequence
ttgccgccttccctcaaacagagagt

SEQ ID NO: 12943 - DNA, 26 bp, Unknown
  Description of Unknown: gRNA target site sequence
tctaatatagtcatgtgttacttaat

SEQ ID NO: 12944 - DNA, 26 bp, Unknown
  Description of Unknown: gRNA target site sequence
aaaggcataaacataagaaaaaaaat

SEQ ID NO: 12945 - DNA, 26 bp, Unknown
  Description of Unknown: gRNA target site sequence
gaaaacatgagggggttgggcgtggt

SEQ ID NO: 12946 - DNA, 26 bp, Unknown
  Description of Unknown: gRNA target site sequence
cactaacacttctcttcattttcaat

SEQ ID NO: 12947 - DNA, 26 bp, Unknown
  Description of Unknown: gRNA target site sequence
gcagaatgttttgatcatgagaaaat

SEQ ID NO: 12948 - DNA, 26 bp, Unknown
  Description of Unknown: gRNA target site sequence
tttcaattctctctccattcttcagt

SEQ ID NO: 12949 - DNA, 26 bp, Unknown
  Description of Unknown: gRNA target site sequence
aacaacattatacaaaggaaaagagt

SEQ ID NO: 12950 - DNA, 26 bp, Unknown
  Description of Unknown: gRNA target site sequence
tcaaatggagtaatgcatgtgacagt

SEQ ID NO: 12951 - DNA, 26 bp, Unknown
  Description of Unknown: gRNA target site sequence
aagtatcagacaggctgggtttgaat

SEQ ID NO: 12952 - DNA, 26 bp, Unknown
  Description of Unknown: gRNA target site sequence
aacagagagttccaggcaggatgaat

SEQ ID NO: 12953 - DNA, 26 bp, Unknown
  Description of Unknown: gRNA target site sequence
tggaaggggtggaaacagagtacaat

SEQ ID NO: 12954 - DNA, 26 bp, Unknown
  Description of Unknown: gRNA target site sequence
ctacattttgtgcataaagtgtaagt

SEQ ID NO: 12955 - DNA, 26 bp, Unknown
  Description of Unknown: gRNA target site sequence
tatacattatcctttatgttgtaaat

SEQ ID NO: 12956 - DNA, 26 bp, Unknown
  Description of Unknown: gRNA target site sequence
ctttatcaaatgtataagaagtaaat

SEQ ID NO: 12957 - DNA, 26 bp, Unknown
  Description of Unknown: gRNA target site sequence
gtttccctgtttgaaaataaaggggt

SEQ ID NO: 12958 - DNA, 26 bp, Unknown
  Description of Unknown: gRNA target site sequence
atctgtttccctttatctcctctagt

SEQ ID NO: 12959 - DNA, 26 bp, Unknown
  Description of Unknown: gRNA target site sequence
tagtcatatcataaagctgctttgat

SEQ ID NO: 12960 - DNA, 26 bp, Unknown
  Description of Unknown: gRNA target site sequence
atacttttcaaagttcatttctcagt

SEQ ID NO: 12961 - DNA, 26 bp, Unknown
  Description of Unknown: gRNA target site sequence
aaagaaagaagtgaaggtttgtcagt

SEQ ID NO: 12962 - DNA, 26 bp, Unknown
  Description of Unknown: gRNA target site sequence
ttcattttcaatgaaaaatatagagt

SEQ ID NO: 12963 - DNA, 26 bp, Unknown
  Description of Unknown: gRNA target site sequence
cttttaaatacacttatattcagggt

SEQ ID NO: 12964 - DNA, 26 bp, Unknown
  Description of Unknown: gRNA target site sequence
aatttatttacaacataaaggataat

SEQ ID NO: 12965 - DNA, 26 bp, Unknown
  Description of Unknown: gRNA target site sequence
tgatggactgtatatatgacagtggt

SEQ ID NO: 12966 - DNA, 26 bp, Unknown
  Description of Unknown: gRNA target site sequence
ttcattcattataacaaatttccaat

SEQ ID NO: 12967 - DNA, 26 bp, Unknown
  Description of Unknown: gRNA target site sequence
gcaatattaatgtgtcttttcccgat

SEQ ID NO: 12968 - DNA, 26 bp, Unknown
  Description of Unknown: gRNA target site sequence
acgctggagtgcactggcgccatgat

SEQ ID NO: 12969 - DNA, 26 bp, Unknown
  Description of Unknown: gRNA target site sequence
tttctttgttttttagctcatgaaat

SEQ ID NO: 12970 - DNA, 26 bp, Unknown
  Description of Unknown: gRNA target site sequence
aaaggctcttaaaaatgcagcgcaat

SEQ ID NO: 12971 - DNA, 26 bp, Unknown
  Description of Unknown: gRNA target site sequence
atggttagaaataaggctggcagaat

SEQ ID NO: 12972 - DNA, 26 bp, Unknown
  Description of Unknown: gRNA target site sequence
ttttctccactgtctttttcatagat

SEQ ID NO: 12973 - DNA, 26 bp, Unknown
  Description of Unknown: gRNA target site sequence
aatataacaggagatttgaatggggt

SEQ ID NO: 12974 - DNA, 26 bp, Unknown
  Description of Unknown: gRNA target site sequence
tagagttcaggtcctggctctacaat

SEQ ID NO: 12975 - DNA, 26 bp, Unknown
  Description of Unknown: gRNA target site sequence
attcattataacaaatttccaataat

SEQ ID NO: 12976 - DNA, 26 bp, Unknown
  Description of Unknown: gRNA target site sequence
ttttaatgttatgaaaaaaatcaggt

SEQ ID NO: 12977 - DNA, 26 bp, Unknown
  Description of Unknown: gRNA target site sequence
atgagaaaattgcatttaatttgaat

SEQ ID NO: 12978 - DNA, 26 bp, Unknown
  Description of Unknown: gRNA target site sequence
ataattttttaaaagtgacatgtgat

SEQ ID NO: 12979 - DNA, 26 bp, Unknown
  Description of Unknown: gRNA target site sequence
tgcatggcatgtattactttggaaat

SEQ ID NO: 12980 - DNA, 26 bp, Unknown
  Description of Unknown: gRNA target site sequence
aacattatacaaaggaaaagagtggt

SEQ ID NO: 12981 - DNA, 26 bp, Unknown
  Description of Unknown: gRNA target site sequence
gggaggctgtggggagaaggaggagt

SEQ ID NO: 12982 - DNA, 26 bp, Unknown
  Description of Unknown: gRNA target site sequence
tacaatttatttacaacataaaggat

SEQ ID NO: 12983 - DNA, 26 bp, Unknown
  Description of Unknown: gRNA target site sequence
ttccaaaacttaactgaaaaattaat

SEQ ID NO: 12984 - DNA, 26 bp, Unknown
  Description of Unknown: gRNA target site sequence
tagtagagtgcctgggacatagcaat

SEQ ID NO: 12985 - DNA, 26 bp, Unknown
  Description of Unknown: gRNA target site sequence
aaatttagaaatataattgacaggat

SEQ ID NO: 12986 - DNA, 26 bp, Unknown
  Description of Unknown: gRNA target site sequence
gtgaaacaaaaacattttctcaaggt

SEQ ID NO: 12987 - DNA, 26 bp, Unknown
  Description of Unknown: gRNA target site sequence
acttgtggaacaaaaataaaccagat

SEQ ID NO: 12988 - DNA, 26 bp, Unknown
  Description of Unknown: gRNA target site sequence
cttctaataataagaacatattaaat

SEQ ID NO: 12989 - DNA, 26 bp, Unknown
  Description of Unknown: gRNA target site sequence
cttattttgaaaatttccaaagtaat

SEQ ID NO: 12990 - DNA, 26 bp, Unknown
  Description of Unknown: gRNA target site sequence
agctcaaaagcctaagctcaagagat

SEQ ID NO: 12991 - DNA, 26 bp, Unknown
  Description of Unknown: gRNA target site sequence
atctacacagtagaaattagacaagt

SEQ ID NO: 12992 - DNA, 26 bp, Unknown
  Description of Unknown: gRNA target site sequence
caaaagtcataaagccagtaactggt

SEQ ID NO: 12993 - DNA, 26 bp, Unknown
  Description of Unknown: gRNA target site sequence
ttatgttagatgtcattttaaaaaat

SEQ ID NO: 12994 - DNA, 26 bp, Unknown
  Description of Unknown: gRNA target site sequence
tcaaagttcatttctcagttcataat

SEQ ID NO: 12995 - DNA, 26 bp, Unknown
  Description of Unknown: gRNA target site sequence
taaattgtattcaaattaaatgcaat

SEQ ID NO: 12996 - DNA, 26 bp, Unknown
  Description of Unknown: gRNA target site sequence
aatattaaaaagcaagcaagcagaat

SEQ ID NO: 12997 - DNA, 26 bp, Unknown
  Description of Unknown: gRNA target site sequence
tgtattactttggaaattttcaaaat

SEQ ID NO: 12998 - DNA, 26 bp, Unknown
  Description of Unknown: gRNA target site sequence
atttgactttccattctctgctggat

SEQ ID NO: 12999 - DNA, 26 bp, Unknown
  Description of Unknown: gRNA target site sequence
atgttgtaaataaattgtattcaaat

SEQ ID NO: 13000 - DNA, 26 bp, Unknown
  Description of Unknown: gRNA target site sequence
gaagataactgttttcaaaattaaat

SEQ ID NO: 13001 - DNA, 26 bp, Unknown
  Description of Unknown: gRNA target site sequence
ccaatccacctcttgatggggctagt

SEQ ID NO: 13002 - DNA, 26 bp, Unknown
  Description of Unknown: gRNA target site sequence
tgtagagccaggacctgaactctaat

SEQ ID NO: 13003 - DNA, 26 bp, Unknown
  Description of Unknown: gRNA target site sequence
ccaaattcaaacccagcctgtctgat

SEQ ID NO: 13004 - DNA, 26 bp, Unknown
  Description of Unknown: gRNA target site sequence
ctgaatataagtgtatttaaaagaat

SEQ ID NO: 13005 - DNA, 26 bp, Unknown
  Description of Unknown: gRNA target site sequence
tctaaccattttagacatttgttagt

SEQ ID NO: 13006 - DNA, 26 bp, Unknown
  Description of Unknown: gRNA target site sequence
aaaattgcatttaatttgaatacaat

SEQ ID NO: 13007 - DNA, 26 bp, Unknown
  Description of Unknown: gRNA target site sequence
aatatcagattgttattttttaaaat

SEQ ID NO: 13008 - DNA, 26 bp, Unknown
  Description of Unknown: gRNA target site sequence
ggtggcctgggagtggggaagggggt

SEQ ID NO: 13009 - DNA, 26 bp, Unknown
  Description of Unknown: gRNA target site sequence
tatatgtgtataaaattcttttaaat

SEQ ID NO: 13010 - DNA, 26 bp, Unknown
  Description of Unknown: gRNA target site sequence
aagttaaataaatcataaaacttgat

SEQ ID NO: 13011 - DNA, 26 bp, Unknown
  Description of Unknown: gRNA target site sequence
ttatatttctaaattttcccccaaat

SEQ ID NO: 13012 - DNA, 26 bp, Unknown
  Description of Unknown: gRNA target site sequence
tgacactaaatatatgtgtataaaat

SEQ ID NO: 13013 - DNA, 26 bp, Unknown
  Description of Unknown: gRNA target site sequence
ggagaaaaaaaaggaagacattaagt

SEQ ID NO: 13014 - DNA, 26 bp, Unknown
  Description of Unknown: gRNA target site sequence
taaactctatatttttcattgaaaat

SEQ ID NO: 13015 - DNA, 26 bp, Unknown
  Description of Unknown: gRNA target site sequence
catatcagcattttttcttctaagat

SEQ ID NO: 13016 - DNA, 26 bp, Unknown
  Description of Unknown: gRNA target site sequence
tagcaatgaatttattttatttggat

SEQ ID NO: 13017 - DNA, 26 bp, Unknown
  Description of Unknown: gRNA target site sequence
aaaatcttagaagaaaaaatgctgat

SEQ ID NO: 13018 - DNA, 26 bp, Unknown
  Description of Unknown: gRNA target site sequence
tttcaaaataagatttttttttaaat

SEQ ID NO: 13019 - DNA, 26 bp, Unknown
  Description of Unknown: gRNA target site sequence
taacaatctgatatttaaaaaaaaat

SEQ ID NO: 13020 - DNA, 26 bp, Unknown
  Description of Unknown: gRNA target site sequence
tctctacaaaaaataataacaaaaat

SEQ ID NO: 13021 - DNA, 26 bp, Unknown
  Description of Unknown: gRNA target site sequence
taagtaacacatgactatattagagt

SEQ ID NO: 13022 - DNA, 26 bp, Unknown
  Description of Unknown: gRNA target site sequence
aacaaaaacaaaacccacacacaggt

SEQ ID NO: 13023 - DNA, 26 bp, Unknown
  Description of Unknown: gRNA target site sequence
aagacattaagttttacttttaaaat

SEQ ID NO: 13024 - DNA, 26 bp, Unknown
  Description of Unknown: gRNA target site sequence
aagagtgtatatgtatttgtgcaagt

SEQ ID NO: 13025 - DNA, 26 bp, Unknown
  Description of Unknown: gRNA target site sequence
ctcctgtggagtggcatgaagaaggt

SEQ ID NO: 13026 - DNA, 26 bp, Unknown
  Description of Unknown: gRNA target site sequence
gtcattttaaaaaataacaatctgat

SEQ ID NO: 13027 - DNA, 26 bp, Unknown
  Description of Unknown: gRNA target site sequence
cttagaagaaaaaatgctgatatgat

SEQ ID NO: 13028 - DNA, 26 bp, Unknown
  Description of Unknown: gRNA target site sequence
gcagctacttcttttaaaaaggtgat

SEQ ID NO: 13029 - DNA, 26 bp, Unknown
  Description of Unknown: gRNA target site sequence
tttgggagagcatcaggaaggtggat

SEQ ID NO: 13030 - DNA, 26 bp, Unknown
  Description of Unknown: gRNA target site sequence
caaacctgaaaagaaaagaaaaaggt

SEQ ID NO: 13031 - DNA, 26 bp, Unknown
  Description of Unknown: gRNA target site sequence
aatcttattttgaaaatttccaaagt

SEQ ID NO: 13032 - DNA, 26 bp, Unknown
  Description of Unknown: gRNA target site sequence
tttttcttaaaaaaaaatgcacgaat

SEQ ID NO: 13033 - DNA, 26 bp, Unknown
  Description of Unknown: gRNA target site sequence
aaaatgtttcattcattataacaaat

SEQ ID NO: 13034 - DNA, 26 bp, Unknown
  Description of Unknown: gRNA target site sequence
tatatatgacagtggtctcataagat

SEQ ID NO: 13035 - DNA, 26 bp, Unknown
  Description of Unknown: gRNA target site sequence
tagatgtcattttaaaaaataacaat

SEQ ID NO: 13036 - DNA, 26 bp, Unknown
  Description of Unknown: gRNA target site sequence
tgttacaactgcccacagtattcagt

SEQ ID NO: 13037 - DNA, 26 bp, Unknown
  Description of Unknown: gRNA target site sequence
agatgaagaaactaaggcaccgagat

SEQ ID NO: 13038 - DNA, 26 bp, Unknown
  Description of Unknown: gRNA target site sequence
tactttggaaattttcaaaataagat

SEQ ID NO: 13039 - DNA, 26 bp, Unknown
  Description of Unknown: gRNA target site sequence
aggtctatggccatactaccctgaat

SEQ ID NO: 13040 - DNA, 26 bp, Unknown
  Description of Unknown: gRNA target site sequence
aatgacggggacatgttctgagaaat

SEQ ID NO: 13041 - DNA, 26 bp, Unknown
  Description of Unknown: gRNA target site sequence
aacataagaaaaaaaatggaaggggt

SEQ ID NO: 13042 - DNA, 26 bp, Unknown
  Description of Unknown: gRNA target site sequence
agtaacaggctgtacaggtttgtagt

SEQ ID NO: 13043 - DNA, 26 bp, Unknown
  Description of Unknown: gRNA target site sequence
gaaaagaaaagaaaaaggttagcaat

SEQ ID NO: 13044 - DNA, 26 bp, Unknown
  Description of Unknown: gRNA target site sequence
ttaaaaaaaaatcttattttgaaaat

SEQ ID NO: 13045 - DNA, 26 bp, Unknown
  Description of Unknown: gRNA target site sequence
tcagtacagtaacaggctgtacaggt

SEQ ID NO: 13046 - DNA, 26 bp, Unknown
  Description of Unknown: gRNA target site sequence
aagaaaagaaagaaagaagtgaaggt

SEQ ID NO: 13047 - DNA, 26 bp, Unknown
  Description of Unknown: gRNA target site sequence
ttgcagtaaaaatatgctattttaat

SEQ ID NO: 13048 - DNA, 26 bp, Unknown
  Description of Unknown: gRNA target site sequence
atggtattttaaaagtaaaacttaat

SEQ ID NO: 13049 - DNA, 26 bp, Unknown
  Description of Unknown: gRNA target site sequence
ccttttttgttttttttctagcagat

SEQ ID NO: 13050 - DNA, 26 bp, Unknown
  Description of Unknown: gRNA target site sequence
gaagcctggtctctacaaaaaataat

SEQ ID NO: 13051 - DNA, 26 bp, Unknown
  Description of Unknown: gRNA target site sequence
caaaacctctttatttctgctgaggt

SEQ ID NO: 13052 - DNA, 26 bp, Unknown
  Description of Unknown: gRNA target site sequence
gtatttgtgtatctaaacatagaagt

SEQ ID NO: 13053 - DNA, 26 bp, Unknown
  Description of Unknown: gRNA target site sequence
caacttctatgtttagatacacaaat

SEQ ID NO: 13054 - DNA, 26 bp, Unknown
  Description of Unknown: gRNA target site sequence
gccgaggcgggaggatggcttgaggt

SEQ ID NO: 13055 - DNA, 26 bp, Unknown
  Description of Unknown: gRNA target site sequence
tgctccggtggctgaggcgggaggat

SEQ ID NO: 13056 - DNA, 26 bp, Unknown
  Description of Unknown: gRNA target site sequence
aaaaaacaaagaaacaaaacctaaat

SEQ ID NO: 13057 - DNA, 26 bp, Unknown
  Description of Unknown: gRNA target site sequence
caactgcccacagtattcagtacagt

SEQ ID NO: 13058 - DNA, 26 bp, Unknown
  Description of Unknown: gRNA target site sequence
ctaacctttttcttttcttttcaggt

SEQ ID NO: 13059 - DNA, 26 bp, Unknown
  Description of Unknown: gRNA target site sequence
ttactgtactgaatactgtgggcagt

SEQ ID NO: 13060 - DNA, 26 bp, Unknown
  Description of Unknown: gRNA target site sequence
tgacagtggtctcataagattaaaat

SEQ ID NO: 13061 - DNA, 26 bp, Unknown
  Description of Unknown: gRNA target site sequence
ggtgaagcctggtctctacaaaaaat

SEQ ID NO: 13062 - DNA, 26 bp, Unknown
  Description of Unknown: gRNA target site sequence
caggctggagtgcagtgtgcagtggt

SEQ ID NO: 13063 - DNA, 26 bp, Unknown
  Description of Unknown: gRNA target site sequence
ataagatttttttttaaatatcagat

SEQ ID NO: 13064 - DNA, 26 bp, Unknown
  Description of Unknown: gRNA target site sequence
ctgtacagcctgttactgtactgaat

SEQ ID NO: 13065 - DNA, 26 bp, Unknown
  Description of Unknown: gRNA target site sequence
caggctgatcacttgaagttgggagt

SEQ ID NO: 13066 - DNA, 26 bp, Unknown
  Description of Unknown: gRNA target site sequence
gtacaggtttgtagtctaggagcaat

SEQ ID NO: 13067 - DNA, 26 bp, Unknown
  Description of Unknown: gRNA target site sequence
gtgcctgtggtcccagctgctccggt

SEQ ID NO: 13068 - DNA, 26 bp, Unknown
  Description of Unknown: gRNA target site sequence
gattccatcccaaaaaataaaaaaat

SEQ ID NO: 13069 - DNA, 26 bp, Unknown
  Description of Unknown: gRNA target site sequence
tggtgtgtgcctgtagtcccaggaat

SEQ ID NO: 13070 - DNA, 26 bp, Unknown
  Description of Unknown: gRNA target site sequence
tatttttttattttttgggatggaat

SEQ ID NO: 13071 - DNA, 26 bp, Unknown
  Description of Unknown: gRNA target site sequence
aatactgtgggcagttgtaacacaat

SEQ ID NO: 13072 - DNA, 26 bp, Unknown
  Description of Unknown: gRNA target site sequence
aaaataataacaaaaattagccgggt

SEQ ID NO: 13073 - DNA, 26 bp, Unknown
  Description of Unknown: gRNA target site sequence
tttttttcttttttgagagacagggt

SEQ ID NO: 13074 - DNA, 26 bp, Unknown
  Description of Unknown: gRNA target site sequence
tatgagaccactgtcatatatacagt

SEQ ID NO: 13075 - DNA, 26 bp, Unknown
  Description of Unknown: gRNA target site sequence
tgggcgtggtagcttacgcctgtaat

SEQ ID NO: 13076 - DNA, 26 bp, Unknown
  Description of Unknown: gRNA target site sequence
cccaaaaaataaaaaaataaaaaaat

SEQ ID NO: 13077 - DNA, 26 bp, Unknown
  Description of Unknown: gRNA target site sequence
actgtgggcagttgtaacacaatggt

SEQ ID NO: 13078 - DNA, 26 bp, Unknown
  Description of Unknown: gRNA target site sequence
agagaaaagaaaagaaagaaagaagt

SEQ ID NO: 13079 - DNA, 26 bp, Unknown
  Description of Unknown: gRNA target site sequence
tctcattccattgcccaggctggagt

SEQ ID NO: 13080 - DNA, 26 bp, Unknown
  Description of Unknown: gRNA target site sequence
gcacactgcactccagcctgggcaat

SEQ ID NO: 13081 - DNA, 26 bp, Unknown
  Description of Unknown: gRNA target site sequence
tgggcagttgtaacacaatggtaagt

SEQ ID NO: 13082 - DNA, 26 bp, Unknown
  Description of Unknown: gRNA target site sequence
cgggaggatggcttgaggtccgtagt

SEQ ID NO: 13083 - DNA, 26 bp, Unknown
  Description of Unknown: gRNA target site sequence
ggcacgagccaccacacccggctaat

SEQ ID NO: 13084 - DNA, 26 bp, Unknown
  Description of Unknown: gRNA target site sequence
tggagtgcagtgtgcagtggtgagat

SEQ ID NO: 13085 - DNA, 26 bp, Unknown
  Description of Unknown: gRNA target site sequence
gcctggccaacatggtgaagcctggt

SEQ ID NO: 13086 - DNA, 26 bp, Unknown
  Description of Unknown: gRNA target site sequence
tgggcacggtggctcgtgcctgtaat

SEQ ID NO: 13087 - DNA, 26 bp, Unknown
  Description of Unknown: gRNA target site sequence
ttccattgcccaggctggagtgcagt

SEQ ID NO: 13088 - DNA, 26 bp, Unknown
  Description of Unknown: gRNA target site sequence
gtcttgaactcccaacttcaagtgat

SEQ ID NO: 13089 - DNA, 26 bp, Unknown
  Description of Unknown: gRNA target site sequence
gccaaggcaggctgatcacttgaagt

SEQ ID NO: 13090 - DNA, 26 bp, Unknown
  Description of Unknown: gRNA target site sequence
ctggtcttgaactcccaacttcaagt

SEQ ID NO: 13091 - DNA, 26 bp, Unknown
  Description of Unknown: gRNA target site sequence
cgggtgtggtggctcgtgcctgtggt

SEQ ID NO: 13092 - DNA, 26 bp, Unknown
  Description of Unknown: gRNA target site sequence
accattgtgttacaactgcccacagt

SEQ ID NO: 13093 - DNA, 26 bp, Unknown
  Description of Unknown: gRNA target site sequence
tctcgctctgttgcccacgctggagt

SEQ ID NO: 13094 - DNA, 26 bp, Unknown
  Description of Unknown: gRNA target site sequence
tacaggcacacaccaccatgcctggt

SEQ ID NO: 13095 - DNA, 26 bp, Unknown
  Description of Unknown: gRNA target site sequence
ttttttatttttttattttttgggat

SEQ ID NO: 13096 - DNA, 26 bp, Unknown
  Description of Unknown: gRNA target site sequence
aataacaaaaattagccgggtgtggt

SEQ ID NO: 13097 - DNA, 26 bp, Unknown
  Description of Unknown: gRNA target site sequence
tacaaaaattaaccaggcatggtggt

SEQ ID NO: 13098 - DNA, 26 bp, Unknown
  Description of Unknown: gRNA target site sequence
atcagcctgccttggcctcccaaagt

SEQ ID NO: 13099 - DNA, 26 bp, Unknown
  Description of Unknown: gRNA target site sequence
acttagggaggccgaggcgggaggat

SEQ ID NO: 13100 - DNA, 26 bp, Unknown
  Description of Unknown: gRNA target site sequence
ggcacacaccaccatgcctggttaat

SEQ ID NO: 13101 - DNA, 26 bp, Unknown
  Description of Unknown: gRNA target site sequence
gcctggttaatttttgtattttcagt

SEQ ID NO: 13102 - DNA, 26 bp, Unknown
  Description of Unknown: gRNA target site sequence
gcccaggctggagtgcagtgtgcagt

SEQ ID NO: 13103 - DNA, 26 bp, Unknown
  Description of Unknown: gRNA target site sequence
caggcatggtggtgtgtgcctgtagt

SEQ ID NO: 13104 - DNA, 26 bp, Unknown
  Description of Unknown: gRNA target site sequence
gttgagaccagcctggccaacatggt

SEQ ID NO: 13105 - DNA, 26 bp, Unknown
  Description of Unknown: gRNA target site sequence
gcctcggcctccctaagtgctgggat

SEQ ID NO: 13106 - DNA, 26 bp, Unknown
  Description of Unknown: gRNA target site sequence
aaatacaaaaattaaccaggcatggt

SEQ ID NO: 13107 - DNA, 26 bp, Unknown
  Description of Unknown: gRNA target site sequence
cccgtctctactgaaaatacaaaaat

SEQ ID NO: 13108 - DNA, 26 bp, Unknown
  Description of Unknown: gRNA target site sequence
ggtgaaatcccgtctctactgaaaat

SEQ ID NO: 13109 - DNA, 26 bp, Unknown
  Description of Unknown: gRNA target site sequence
ggcttcaccatgttggccaggctggt

SEQ ID NO: 13110 - DNA, 26 bp, Unknown
  Description of Unknown: gRNA target site sequence
actttgggaggccaaggcaggctgat

SEQ ID NO: 13111 - DNA, 26 bp, Unknown
  Description of Unknown: gRNA target site sequence
ttcaagaccagcctggccaacatggt

SEQ ID NO: 13112 - DNA, 26 bp, Unknown
  Description of Unknown: gRNA target site sequence
gaccagcctggccaacatggtgaaat

SEQ ID NO: 13113 - DNA, 26 bp, Unknown
  Description of Unknown: gRNA target site sequence
atcacttgaacccaggaggcggaggt

SEQ ID NO: 13114 - DNA, 26 bp, Unknown
  Description of Unknown: gRNA target site sequence
tgaacccaggaggcggaggttgcagt

SEQ ID NO: 13115 - DNA, 26 bp, Unknown
  Description of Unknown: gRNA target site sequence
aggcggaggttgcagtgagctgagat

SEQ ID NO: 13116 - DNA, 26 bp, Unknown
  Description of Unknown: gRNA target site sequence
ctgcactccagcctgggcaatggaat

SEQ ID NO: 13117 - DNA, 26 bp, Unknown
  Description of Unknown: gRNA target site sequence
ctcactgcaacctccgcctcctgggt

SEQ ID NO: 13118 - DNA, 26 bp, Unknown
  Description of Unknown: gRNA target site sequence
gcaacctccgcctcctgggttcaagt

SEQ ID NO: 13119 - DNA, 26 bp, Unknown
  Description of Unknown: gRNA target site sequence
acctccgcctcctgggttcaagtgat

SEQ ID NO: 13120 - DNA, 26 bp, Unknown
  Description of Unknown: gRNA target site sequence
ttttgtattttcagtagagacgggat

SEQ ID NO: 13121 - DNA, 26 bp, Unknown
  Description of Unknown: gRNA target site sequence
gatttcaccatgttggccaggctggt

SEQ ID NO: 13122 - DNA, 26 bp, Unknown
  Description of Unknown: gRNA target site sequence
gccttggcctcccaaagtgttgggat

SEQ ID NO: 13123 - DNA, 26 bp, Unknown
  Description of Unknown: gRNA target site sequence
atcctcccgcctcggcctccctaagt

SEQ ID NO: 13124 - DNA, 27 bp, Unknown
  Description of Unknown: gRNA target site sequence
aggccccgcgaaagagcggaagagaaa

SEQ ID NO: 13125 - DNA, 27 bp, Unknown
  Description of Unknown: gRNA target site sequence
gtttactcacgtcatccagcagagaat

SEQ ID NO: 13126 - DNA, 27 bp, Unknown
  Description of Unknown: gRNA target site sequence
tgatgggggctattatgaactgagaaa

SEQ ID NO: 13127 - DNA, 27 bp, Unknown
  Description of Unknown: gRNA target site sequence
gcaacttagaggtggggagcagagaat

SEQ ID NO: 13128 - DNA, 27 bp, Unknown
  Description of Unknown: gRNA target site sequence
gaccatccatggggaagtgggaagaaa

SEQ ID NO: 13129 - DNA, 27 bp, Unknown
  Description of Unknown: gRNA target site sequence
tgcggcatcttcaaacctgaaaagaaa

SEQ ID NO: 13130 - DNA, 27 bp, Unknown
  Description of Unknown: gRNA target site sequence
gtctggcatataaaacctcagcagaaa

SEQ ID NO: 13131 - DNA, 27 bp, Unknown
  Description of Unknown: gRNA target site sequence
catgccgcccagtttgctctggagaat

SEQ ID NO: 13132 - DNA, 27 bp, Unknown
  Description of Unknown: gRNA target site sequence
ttggtgctcccaaaatcttagaagaaa

SEQ ID NO: 13133 - DNA, 27 bp, Unknown
  Description of Unknown: gRNA target site sequence
agaagtccttgagagcctccagagaaa

SEQ ID NO: 13134 - DNA, 27 bp, Unknown
  Description of Unknown: gRNA target site sequence
ggaaacagcacgcgacgtttgtagaat

SEQ ID NO: 13135 - DNA, 27 bp, Unknown
  Description of Unknown: gRNA target site sequence
tactagacacttcatacagtttagaaa

SEQ ID NO: 13136 - DNA, 27 bp, Unknown
  Description of Unknown: gRNA target site sequence
cttagtgtattgccaggtacttagaaa

SEQ ID NO: 13137 - DNA, 27 bp, Unknown
  Description of Unknown: gRNA target site sequence
ctggcaaaacatgatcgaaagcagaat

SEQ ID NO: 13138 - DNA, 27 bp, Unknown
  Description of Unknown: gRNA target site sequence
agcctcagataccaatccagccagaaa

SEQ ID NO: 13139 - DNA, 27 bp, Unknown
  Description of Unknown: gRNA target site sequence
tggaggtaagtttttgaccttgagaaa

SEQ ID NO: 13140 - DNA, 27 bp, Unknown
  Description of Unknown: gRNA target site sequence
tccagtgacagaagatactgctagaaa

SEQ ID NO: 13141 - DNA, 27 bp, Unknown
  Description of Unknown: gRNA target site sequence
ggaatatattgcctaatgtttcagaaa

SEQ ID NO: 13142 - DNA, 27 bp, Unknown
  Description of Unknown: gRNA target site sequence
actgcagggaaactactggttcagaaa

SEQ ID NO: 13143 - DNA, 27 bp, Unknown
  Description of Unknown: gRNA target site sequence
attggacatctctgctgaggagagaaa

SEQ ID NO: 13144 - DNA, 27 bp, Unknown
  Description of Unknown: gRNA target site sequence
acaactttcagcagcttacaaaagaat

SEQ ID NO: 13145 - DNA, 27 bp, Unknown
  Description of Unknown: gRNA target site sequence
cacgctggatagcctccaggccagaaa

SEQ ID NO: 13146 - DNA, 27 bp, Unknown
  Description of Unknown: gRNA target site sequence
catgtttcttgtggtatcttccagaaa

SEQ ID NO: 13147 - DNA, 27 bp, Unknown
  Description of Unknown: gRNA target site sequence
ttccaatttacatactctgcttagaat

SEQ ID NO: 13148 - DNA, 27 bp, Unknown
  Description of Unknown: gRNA target site sequence
gtctgatacttgtcctcttcttagaaa

SEQ ID NO: 13149 - DNA, 27 bp, Unknown
  Description of Unknown: gRNA target site sequence
aattcagtgtagtacaagagatagaaa

SEQ ID NO: 13150 - DNA, 27 bp, Unknown
  Description of Unknown: gRNA target site sequence
ccttgaccagatatatctctctagaaa

SEQ ID NO: 13151 - DNA, 27 bp, Unknown
  Description of Unknown: gRNA target site sequence
ccagagtggaaatggaattgggagaaa

SEQ ID NO: 13152 - DNA, 27 bp, Unknown
  Description of Unknown: gRNA target site sequence
caagatgttgatgttggataagagaat

SEQ ID NO: 13153 - DNA, 27 bp, Unknown
  Description of Unknown: gRNA target site sequence
aatggttagaaataaggctggcagaat

SEQ ID NO: 13154 - DNA, 27 bp, Unknown
  Description of Unknown: gRNA target site sequence
gcatcaatgtaccctgggcagtagaat

SEQ ID NO: 13155 - DNA, 27 bp, Unknown
  Description of Unknown: gRNA target site sequence
gcacataaagtccttggcacacagaaa

SEQ ID NO: 13156 - DNA, 27 bp, Unknown
  Description of Unknown: gRNA target site sequence
caacaagccacctccattttgaagaat

SEQ ID NO: 13157 - DNA, 27 bp, Unknown
  Description of Unknown: gRNA target site sequence
gacattgaagttgacttactgaagaat

SEQ ID NO: 13158 - DNA, 27 bp, Unknown
  Description of Unknown: gRNA target site sequence
aaggcaggagcaggaaccaaaaagaaa

SEQ ID NO: 13159 - DNA, 27 bp, Unknown
  Description of Unknown: gRNA target site sequence
cgatctatgaaaaagacagtggagaaa

SEQ ID NO: 13160 - DNA, 27 bp, Unknown
  Description of Unknown: gRNA target site sequence
ataactcctctcttctgtctgaagaat

SEQ ID NO: 13161 - DNA, 27 bp, Unknown
  Description of Unknown: gRNA target site sequence
tgacttactgaagaatggagagagaat

SEQ ID NO: 13162 - DNA, 27 bp, Unknown
  Description of Unknown: gRNA target site sequence
tcccaaatcaattccctgttctagaat

SEQ ID NO: 13163 - DNA, 27 bp, Unknown
  Description of Unknown: gRNA target site sequence
tgtccaatgtggaaatggcagaagaaa

SEQ ID NO: 13164 - DNA, 27 bp, Unknown
  Description of Unknown: gRNA target site sequence
acatggagacagcactcaaagtagaat

SEQ ID NO: 13165 - DNA, 27 bp, Unknown
  Description of Unknown: gRNA target site sequence
ttaaaaaggtgatctacacagtagaaa

SEQ ID NO: 13166 - DNA, 27 bp, Unknown
  Description of Unknown: gRNA target site sequence
aagatactgctagaaatctgctagaaa

SEQ ID NO: 13167 - DNA, 27 bp, Unknown
  Description of Unknown: gRNA target site sequence
atcttctgcctctcacagatgaagaaa

SEQ ID NO: 13168 - DNA, 27 bp, Unknown
  Description of Unknown: gRNA target site sequence
ctaacaaatgtctaaaatggttagaaa

SEQ ID NO: 13169 - DNA, 27 bp, Unknown
  Description of Unknown: gRNA target site sequence
aaagcagaatgttttgatcatgagaaa

SEQ ID NO: 13170 - DNA, 27 bp, Unknown
  Description of Unknown: gRNA target site sequence
aaactaaggcaccgagattttaagaaa

SEQ ID NO: 13171 - DNA, 27 bp, Unknown
  Description of Unknown: gRNA target site sequence
accatttctggaagataccacaagaaa

SEQ ID NO: 13172 - DNA, 27 bp, Unknown
  Description of Unknown: gRNA target site sequence
catcttcaaacctgaaaagaaaagaaa

SEQ ID NO: 13173 - DNA, 27 bp, Unknown
  Description of Unknown: gRNA target site sequence
cctgaatataagtgtatttaaaagaat

SEQ ID NO: 13174 - DNA, 27 bp, Unknown
  Description of Unknown: gRNA target site sequence
gtaacattttagcagggaaagaagaat

SEQ ID NO: 13175 - DNA, 27 bp, Unknown
  Description of Unknown: gRNA target site sequence
aatttcatgagctaaaaaacaaagaaa

SEQ ID NO: 13176 - DNA, 27 bp, Unknown
  Description of Unknown: gRNA target site sequence
cttagaatttgggggaaaatttagaaa

SEQ ID NO: 13177 - DNA, 27 bp, Unknown
  Description of Unknown: gRNA target site sequence
caaaaagaaaggcataaacataagaaa

SEQ ID NO: 13178 - DNA, 27 bp, Unknown
  Description of Unknown: gRNA target site sequence
caatattaaaaagcaagcaagcagaat

SEQ ID NO: 13179 - DNA, 27 bp, Unknown
  Description of Unknown: gRNA target site sequence
gtaattcgtgcatttttttttaagaaa

SEQ ID NO: 13180 - DNA, 27 bp, Unknown
  Description of Unknown: gRNA target site sequence
gcgagaccctgtctctcaaaaaagaaa

SEQ ID NO: 13181 - DNA, 27 bp, Unknown
  Description of Unknown: gRNA target site sequence
ttaatgacggggacatgttctgagaaa

SEQ ID NO: 13182 - DNA, 27 bp, Unknown
  Description of Unknown: gRNA target site sequence
aaagaaagagaaaagaaaagaaagaaa

SEQ ID NO: 13183 - DNA, 27 bp, Unknown
  Description of Unknown: gRNA target site sequence
aaaaaaaaaaaagaaagagaaaagaaa

SEQ ID NO: 13184 - DNA, 27 bp, Unknown
  Description of Unknown: gRNA target site sequence
caaaaaagaaaaaaaaaaaaaaagaaa

SEQ ID NO: 13185 - DNA, 27 bp, Unknown
  Description of Unknown: gRNA target site sequence
aaaaaaagaaagagaaaagaaaagaaa

SEQ ID NO: 13186 - DNA, 27 bp, Unknown
  Description of Unknown: gRNA target site sequence
agaaaaaaaaaaaaaaagaaagagaaa

SEQ ID NO: 13187 - DNA, 28 bp, Unknown
  Description of Unknown: gRNA target site sequence
tcaggtttgaagatgccgcatttggatt

SEQ ID NO: 13188 - DNA, 28 bp, Unknown
  Description of Unknown: gRNA target site sequence
ccgatattcctcaggtactccaaagatt

SEQ ID NO: 13189 - DNA, 28 bp, Unknown
  Description of Unknown: gRNA target site sequence
tctctgtttgagggaaggcggcaagatt

SEQ ID NO: 13190 - DNA, 28 bp, Unknown
  Description of Unknown: gRNA target site sequence
agtgttagtgctactaaatatacagatt

SEQ ID NO: 13191 - DNA, 28 bp, Unknown
  Description of Unknown: gRNA target site sequence
ctggttaggcttgacttcaatctcgatt

SEQ ID NO: 13192 - DNA, 28 bp, Unknown
  Description of Unknown: gRNA target site sequence
ggctactagccccatcaagaggtggatt

SEQ ID NO: 13193 - DNA, 28 bp, Unknown
  Description of Unknown: gRNA target site sequence
tcctgccttgatctacacccatctgatt

SEQ ID NO: 13194 - DNA, 28 bp, Unknown
  Description of Unknown: gRNA target site sequence
caggggataaatggcagcaatcgagatt

SEQ ID NO: 13195 - DNA, 28 bp, Unknown
  Description of Unknown: gRNA target site sequence
gatacttgtcctcttcttagaaaagatt

SEQ ID NO: 13196 - DNA, 28 bp, Unknown
  Description of Unknown: gRNA target site sequence
attccctgacaatcccaatatgcagatt

SEQ ID NO: 13197 - DNA, 28 bp, Unknown
  Description of Unknown: gRNA target site sequence
ggagaagggaacatgaccctgtaggatt

SEQ ID NO: 13198 - DNA, 28 bp, Unknown
  Description of Unknown: gRNA target site sequence
tgttatattctagaacagggaattgatt

SEQ ID NO: 13199 - DNA, 28 bp, Unknown
  Description of Unknown: gRNA target site sequence
ctagcagtatcttctgtcactggagatt

SEQ ID NO: 13200 - DNA, 28 bp, Unknown
  Description of Unknown: gRNA target site sequence
tcaacagtcttggtaaccatcttggatt

SEQ ID NO: 13201 - DNA, 28 bp, Unknown
  Description of Unknown: gRNA target site sequence
aacacatcactcaagagtctacatgatt

SEQ ID NO: 13202 - DNA, 28 bp, Unknown
  Description of Unknown: gRNA target site sequence
tcttaacaagctttgagtgcaagagatt

SEQ ID NO: 13203 - DNA, 28 bp, Unknown
  Description of Unknown: gRNA target site sequence
gattggggaatctaatgaagacctgatt

SEQ ID NO: 13204 - DNA, 28 bp, Unknown
  Description of Unknown: gRNA target site sequence
atggagtaatgcatgtgacagtgggatt

SEQ ID NO: 13205 - DNA, 28 bp, Unknown
  Description of Unknown: gRNA target site sequence
gaaaaacgcctgccttctgcgtgagatt

SEQ ID NO: 13206 - DNA, 28 bp, Unknown
  Description of Unknown: gRNA target site sequence
aaatgcctcagggatcagagcacagatt

SEQ ID NO: 13207 - DNA, 28 bp, Unknown
  Description of Unknown: gRNA target site sequence
tccctgttctagaatataacaggagatt

SEQ ID NO: 13208 - DNA, 28 bp, Unknown
  Description of Unknown: gRNA target site sequence
cactagaggagataaagggaaacagatt

SEQ ID NO: 13209 - DNA, 28 bp, Unknown
  Description of Unknown: gRNA target site sequence
gcgttttaattagcatccacaggtgatt

SEQ ID NO: 13210 - DNA, 28 bp, Unknown
  Description of Unknown: gRNA target site sequence
accaagtgtttacatttggtcatcgatt

SEQ ID NO: 13211 - DNA, 28 bp, Unknown
  Description of Unknown: gRNA target site sequence
gtcagggaatgttcttaaagatcagatt

SEQ ID NO: 13212 - DNA, 28 bp, Unknown
  Description of Unknown: gRNA target site sequence
gacggtccctgcgggccttgtcctgatt

SEQ ID NO: 13213 - DNA, 28 bp, Unknown
  Description of Unknown: gRNA target site sequence
gacttctccagtactttctggctggatt

SEQ ID NO: 13214 - DNA, 28 bp, Unknown
  Description of Unknown: gRNA target site sequence
ccagaaagtactggagaagtccaggatt

SEQ ID NO: 13215 - DNA, 28 bp, Unknown
  Description of Unknown: gRNA target site sequence
tgatataaacaatctgcatattgggatt

SEQ ID NO: 13216 - DNA, 28 bp, Unknown
  Description of Unknown: gRNA target site sequence
atgaaaaaaatcaggtcttcattagatt

SEQ ID NO: 13217 - DNA, 28 bp, Unknown
  Description of Unknown: gRNA target site sequence
tatccaacatcaacatcttggtcagatt

SEQ ID NO: 13218 - DNA, 28 bp, Unknown
  Description of Unknown: gRNA target site sequence
ataccacaagaaacatgtaatgatgatt

SEQ ID NO: 13219 - DNA, 28 bp, Unknown
  Description of Unknown: gRNA target site sequence
aagagataacacatcaagttttatgatt

SEQ ID NO: 13220 - DNA, 28 bp, Unknown
  Description of Unknown: gRNA target site sequence
tgaatgaaacattttgtcatataagatt

SEQ ID NO: 13221 - DNA, 28 bp, Unknown
  Description of Unknown: gRNA target site sequence
aacttgtggaacaaaaataaaccagatt

SEQ ID NO: 13222 - DNA, 28 bp, Unknown
  Description of Unknown: gRNA target site sequence
tcatatcagcattttttcttctaagatt

SEQ ID NO: 13223 - DNA, 28 bp, Unknown
  Description of Unknown: gRNA target site sequence
ttactttggaaattttcaaaataagatt

SEQ ID NO: 13224 - DNA, 28 bp, Unknown
  Description of Unknown: gRNA target site sequence
ttagcaatgaatttattttatttggatt

SEQ ID NO: 13225 - DNA, 28 bp, Unknown
  Description of Unknown: gRNA target site sequence
aaaatttagaaatataattgacaggatt

SEQ ID NO: 13226 - DNA, 28 bp, Unknown
  Description of Unknown: gRNA target site sequence
cagatgaagaaactaaggcaccgagatt

SEQ ID NO: 13227 - DNA, 28 bp, Unknown
  Description of Unknown: gRNA target site sequence
aataagatttttttttaaatatcagatt

SEQ ID NO: 13228 - DNA, 28 bp, Unknown
  Description of Unknown: gRNA target site sequence
gtatatatgacagtggtctcataagatt

SEQ ID NO: 13229 - DNA, 28 bp, Unknown
  Description of Unknown: gRNA target site sequence
actccagcctgggcaatggaatgagatt

SEQ ID NO: 13230 - DNA, 28 bp, Unknown
  Description of Unknown: gRNA target site sequence
gccttttttgttttttttctagcagatt

SEQ ID NO: 13231 - DNA, 28 bp, Unknown
  Description of Unknown: gRNA target site sequence
cgcctcggcctccctaagtgctgggatt

SEQ ID NO: 13232 - DNA, 28 bp, Unknown
  Description of Unknown: gRNA target site sequence
tttttgtattttcagtagagacgggatt

SEQ ID NO: 13233 - DNA, 28 bp, Unknown
  Description of Unknown: gRNA target site sequence
aacctccgcctcctgggttcaagtgatt

SEQ ID NO: 13234 - DNA, 28 bp, Unknown
  Description of Unknown: gRNA target site sequence
tgccttggcctcccaaagtgttgggatt

SEQ ID NO: 13235 - DNA, 26 bp, Unknown
  Description of Unknown: gRNA target site sequence
gcgctcaccttttcctctggcaaaac

SEQ ID NO: 13236 - DNA, 26 bp, Unknown
  Description of Unknown: gRNA target site sequence
tcagagaggggtctggcatataaaac

SEQ ID NO: 13237 - DNA, 26 bp, Unknown
  Description of Unknown: gRNA target site sequence
atatacagtccatcattgaccaaaac

SEQ ID NO: 13238 - DNA, 26 bp, Unknown
  Description of Unknown: gRNA target site sequence
agtcctcaggacagtgaaacaaaaac

SEQ ID NO: 13239 - DNA, 26 bp, Unknown
  Description of Unknown: gRNA target site sequence
atttatgcccacagtaaaacaaaaac

SEQ ID NO: 13240 - DNA, 26 bp, Unknown
  Description of Unknown: gRNA target site sequence
aaattaatttatgcccacagtaaaac

SEQ ID NO: 13241 - DNA, 26 bp, Unknown
  Description of Unknown: gRNA target site sequence
aaaaacattttctcaaggtcaaaaac

SEQ ID NO: 13242 - DNA, 26 bp, Unknown
  Description of Unknown: gRNA target site sequence
ggtatgttcttaccaaacaacaaaac

SEQ ID NO: 13243 - DNA, 26 bp, Unknown
  Description of Unknown: gRNA target site sequence
aaatgcaattttctcatgatcaaaac

SEQ ID NO: 13244 - DNA, 26 bp, Unknown
  Description of Unknown: gRNA target site sequence
tgcctcttactttcggttttgaaaac

SEQ ID NO: 13245 - DNA, 26 bp, Unknown
  Description of Unknown: gRNA target site sequence
tccacaagttaaataaatcataaaac

SEQ ID NO: 13246 - DNA, 26 bp, Unknown
  Description of Unknown: gRNA target site sequence
tttgtcagtcaggggagctgtaaaac

SEQ ID NO: 13247 - DNA, 26 bp, Unknown
  Description of Unknown: gRNA target site sequence
aatcacctgtggatgctaattaaaac

SEQ ID NO: 13248 - DNA, 26 bp, Unknown
  Description of Unknown: gRNA target site sequence
tgctagaaatctgctagaaaaaaaac

SEQ ID NO: 13249 - DNA, 26 bp, Unknown
  Description of Unknown: gRNA target site sequence
gctttgcgtcatttaattttgaaaac

SEQ ID NO: 13250 - DNA, 26 bp, Unknown
  Description of Unknown: gRNA target site sequence
cctctcttctgtctgaagaataaaac

SEQ ID NO: 13251 - DNA, 26 bp, Unknown
  Description of Unknown: gRNA target site sequence
agtacatggtattttaaaagtaaaac

SEQ ID NO: 13252 - DNA, 26 bp, Unknown
  Description of Unknown: gRNA target site sequence
gcccaaccccctcatgttttcaaaac

SEQ ID NO: 13253 - DNA, 26 bp, Unknown
  Description of Unknown: gRNA target site sequence
gtacctaatttcatgagctaaaaaac

SEQ ID NO: 13254 - DNA, 26 bp, Unknown
  Description of Unknown: gRNA target site sequence
ttcgtgcatttttttttaagaaaaac

SEQ ID NO: 13255 - DNA, 26 bp, Unknown
  Description of Unknown: gRNA target site sequence
tggagagttatttaagcttccaaaac

SEQ ID NO: 13256 - DNA, 26 bp, Unknown
  Description of Unknown: gRNA target site sequence
tgcccacagtaaaacaaaaacaaaac

SEQ ID NO: 13257 - DNA, 26 bp, Unknown
  Description of Unknown: gRNA target site sequence
tgagctaaaaaacaaagaaacaaaac

SEQ ID NO: 13258 - DNA, 27 bp, Unknown
  Description of Unknown: gRNA target site sequence
tttaatataagtggaggcgtcgcgctg

SEQ ID NO: 13259 - DNA, 27 bp, Unknown
  Description of Unknown: gRNA target site sequence
tttctggcctggaggctatccagcgtg

SEQ ID NO: 13260 - DNA, 27 bp, Unknown
  Description of Unknown: gRNA target site sequence
tttcggcggggagcaggggagaccttt

SEQ ID NO: 13261 - DNA, 27 bp, Unknown
  Description of Unknown: gRNA target site sequence
tttggcctacggcgacgggagggtcgg

SEQ ID NO: 13262 - DNA, 27 bp, Unknown
  Description of Unknown: gRNA target site sequence
tttgtcccgaccctcccgtcgccgtag

SEQ ID NO: 13263 - DNA, 27 bp, Unknown
  Description of Unknown: gRNA target site sequence
tttagggcgtcgataagcgtcagagcg

SEQ ID NO: 13264 - DNA, 27 bp, Unknown
  Description of Unknown: gRNA target site sequence
tttctcttccgctctttcgcggggcct

SEQ ID NO: 13265 - DNA, 27 bp, Unknown
  Description of Unknown: gRNA target site sequence
tttcgcggggcctctggctcccccagc

SEQ ID NO: 13266 - DNA, 27 bp, Unknown
  Description of Unknown: gRNA target site sequence
tttgggacgagcctacccgtcccccac

SEQ ID NO: 13267 - DNA, 27 bp, Unknown
  Description of Unknown: gRNA target site sequence
tttgtgaacgcgtggaggggcgcttgg

SEQ ID NO: 13268 - DNA, 27 bp, Unknown
  Description of Unknown: gRNA target site sequence
tttcctccccacggtgtggccccacat

SEQ ID NO: 13269 - DNA, 27 bp, Unknown
  Description of Unknown: gRNA target site sequence
tttgtagaatgcttggctgtgatacaa

SEQ ID NO: 13270 - DNA, 27 bp, Unknown
  Description of Unknown: gRNA target site sequence
tttgtatcacagccaagcattctacaa

SEQ ID NO: 13271 - DNA, 27 bp, Unknown
  Description of Unknown: gRNA target site sequence
tttcgaataattaacttatttgttccc

SEQ ID NO: 13272 - DNA, 27 bp, Unknown
  Description of Unknown: gRNA target site sequence
tttgttcccatcacatgtcacttttaa

SEQ ID NO: 13273 - DNA, 27 bp, Unknown
  Description of Unknown: gRNA target site sequence
tttaaaagtgacatgtgatgggaacaa

SEQ ID NO: 13274 - DNA, 27 bp, Unknown
  Description of Unknown: gRNA target site sequence
ttttaaaagtgacatgtgatgggaaca

SEQ ID NO: 13275 - DNA, 27 bp, Unknown
  Description of Unknown: gRNA target site sequence
tttttaaaagtgacatgtgatgggaac

SEQ ID NO: 13276 - DNA, 27 bp, Unknown
  Description of Unknown: gRNA target site sequence
ttttttaaaagtgacatgtgatgggaa

SEQ ID NO: 13277 - DNA, 27 bp, Unknown
  Description of Unknown: gRNA target site sequence
ttttaaaaaattataagaactacccgt

SEQ ID NO: 13278 - DNA, 27 bp, Unknown
  Description of Unknown: gRNA target site sequence
tttaaaaaattataagaactacccgtt

SEQ ID NO: 13279 - DNA, 27 bp, Unknown
  Description of Unknown: gRNA target site sequence
tttctgtgtgccaaggactttatgtgc

SEQ ID NO: 13280 - DNA, 27 bp, Unknown
  Description of Unknown: gRNA target site sequence
tttatgtgctttgcgtcatttaatttt

SEQ ID NO: 13281 - DNA, 27 bp, Unknown
  Description of Unknown: gRNA target site sequence
tttcaaaattaaatgacgcaaagcaca

SEQ ID NO: 13282 - DNA, 27 bp, Unknown
  Description of Unknown: gRNA target site sequence
ttttcaaaattaaatgacgcaaagcac

SEQ ID NO: 13283 - DNA, 27 bp, Unknown
  Description of Unknown: gRNA target site sequence
tttgcgtcatttaattttgaaaacagt

SEQ ID NO: 13284 - DNA, 27 bp, Unknown
  Description of Unknown: gRNA target site sequence
tttaattttgaaaacagttatcttccg

SEQ ID NO: 13285 - DNA, 27 bp, Unknown
  Description of Unknown: gRNA target site sequence
ttttgaaaacagttatcttccgccata

SEQ ID NO: 13286 - DNA, 27 bp, Unknown
  Description of Unknown: gRNA target site sequence
tttgaaaacagttatcttccgccatag

SEQ ID NO: 13287 - DNA, 27 bp, Unknown
  Description of Unknown: gRNA target site sequence
tttcttcatctgtgagaggcagaagat

SEQ ID NO: 13288 - DNA, 27 bp, Unknown
  Description of Unknown: gRNA target site sequence
tttcttaaaatctcggtgccttagttt

SEQ ID NO: 13289 - DNA, 27 bp, Unknown
  Description of Unknown: gRNA target site sequence
ttttaagaaacttaattacacagggga

SEQ ID NO: 13290 - DNA, 27 bp, Unknown
  Description of Unknown: gRNA target site sequence
tttaagaaacttaattacacaggggat

SEQ ID NO: 13291 - DNA, 27 bp, Unknown
  Description of Unknown: gRNA target site sequence
tttatcccctgtgtaattaagtttctt

SEQ ID NO: 13292 - DNA, 27 bp, Unknown
  Description of Unknown: gRNA target site sequence
ttttgcgggagcgcatgccttttggct

SEQ ID NO: 13293 - DNA, 27 bp, Unknown
  Description of Unknown: gRNA target site sequence
tttgcgggagcgcatgccttttggctg

SEQ ID NO: 13294 - DNA, 27 bp, Unknown
  Description of Unknown: gRNA target site sequence
ttttggctgtaattcgtgcattttttt

SEQ ID NO: 13295 - DNA, 27 bp, Unknown
  Description of Unknown: gRNA target site sequence
tttggctgtaattcgtgcatttttttt

SEQ ID NO: 13296 - DNA, 27 bp, Unknown
  Description of Unknown: gRNA target site sequence
tttcttaaaaaaaaatgcacgaattac

SEQ ID NO: 13297 - DNA, 27 bp, Unknown
  Description of Unknown: gRNA target site sequence
ttttcttaaaaaaaaatgcacgaatta

SEQ ID NO: 13298 - DNA, 27 bp, Unknown
  Description of Unknown: gRNA target site sequence
tttttcttaaaaaaaaatgcacgaatt

SEQ ID NO: 13299 - DNA, 27 bp, Unknown
  Description of Unknown: gRNA target site sequence
tttttttttaagaaaaacgcctgcctt

SEQ ID NO: 13300 - DNA, 27 bp, Unknown
  Description of Unknown: gRNA target site sequence
ttttttttaagaaaaacgcctgccttc

SEQ ID NO: 13301 - DNA, 27 bp, Unknown
  Description of Unknown: gRNA target site sequence
tttttttaagaaaaacgcctgccttct

SEQ ID NO: 13302 - DNA, 27 bp, Unknown
  Description of Unknown: gRNA target site sequence
ttttttaagaaaaacgcctgccttctg

SEQ ID NO: 13303 - DNA, 27 bp, Unknown
  Description of Unknown: gRNA target site sequence
tttttaagaaaaacgcctgccttctgc

SEQ ID NO: 13304 - DNA, 27 bp, Unknown
  Description of Unknown: gRNA target site sequence
ttttaagaaaaacgcctgccttctgcg

SEQ ID NO: 13305 - DNA, 27 bp, Unknown
  Description of Unknown: gRNA target site sequence
tttaagaaaaacgcctgccttctgcgt

SEQ ID NO: 13306 - DNA, 27 bp, Unknown
  Description of Unknown: gRNA target site sequence
tttgctctggagaatctcacgcagaag

SEQ ID NO: 13307 - DNA, 27 bp, Unknown
  Description of Unknown: gRNA target site sequence
ttttcgtacagagggcttcctctttgg

SEQ ID NO: 13308 - DNA, 27 bp, Unknown
  Description of Unknown: gRNA target site sequence
tttcgtacagagggcttcctctttggc

SEQ ID NO: 13309 - DNA, 27 bp, Unknown
  Description of Unknown: gRNA target site sequence
tttggctctttgcctggttgtttccaa

SEQ ID NO: 13310 - DNA, 27 bp, Unknown
  Description of Unknown: gRNA target site sequence
tttgcctggttgtttccaagatgtact

SEQ ID NO: 13311 - DNA, 27 bp, Unknown
  Description of Unknown: gRNA target site sequence
tttccaagatgtactgtgcctcttact

SEQ ID NO: 13312 - DNA, 27 bp, Unknown
  Description of Unknown: gRNA target site sequence
tttcaaaaccgaaagtaagaggcacag

SEQ ID NO: 13313 - DNA, 27 bp, Unknown
  Description of Unknown: gRNA target site sequence
ttttcaaaaccgaaagtaagaggcaca

SEQ ID NO: 13314 - DNA, 27 bp, Unknown
  Description of Unknown: gRNA target site sequence
tttcggttttgaaaacatgagggggtt

SEQ ID NO: 13315 - DNA, 27 bp, Unknown
  Description of Unknown: gRNA target site sequence
ttttgaaaacatgagggggttgggcgt

SEQ ID NO: 13316 - DNA, 27 bp, Unknown
  Description of Unknown: gRNA target site sequence
tttgaaaacatgagggggttgggcgtg

SEQ ID NO: 13317 - DNA, 27 bp, Unknown
  Description of Unknown: gRNA target site sequence
tttgtagagaccaggcttcaccatgtt

SEQ ID NO: 13318 - DNA, 27 bp, Unknown
  Description of Unknown: gRNA target site sequence
ttttgtagagaccaggcttcaccatgt

SEQ ID NO: 13319 - DNA, 27 bp, Unknown
  Description of Unknown: gRNA target site sequence
tttttgtagagaccaggcttcaccatg

SEQ ID NO: 13320 - DNA, 27 bp, Unknown
  Description of Unknown: gRNA target site sequence
ttttttgtagagaccaggcttcaccat

SEQ ID NO: 13321 - DNA, 27 bp, Unknown
  Description of Unknown: gRNA target site sequence
tttgttattattttttgtagagaccag

SEQ ID NO: 13322 - DNA, 27 bp, Unknown
  Description of Unknown: gRNA target site sequence
ttttgttattattttttgtagagacca

SEQ ID NO: 13323 - DNA, 27 bp, Unknown
  Description of Unknown: gRNA target site sequence
tttttgttattattttttgtagagacc

SEQ ID NO: 13324 - DNA, 27 bp, Unknown
  Description of Unknown: gRNA target site sequence
ttttgagctatcatggcgccagtgcac

SEQ ID NO: 13325 - DNA, 27 bp, Unknown
  Description of Unknown: gRNA target site sequence
tttgagctatcatggcgccagtgcact

SEQ ID NO: 13326 - DNA, 27 bp, Unknown
  Description of Unknown: gRNA target site sequence
tttgagagacagggtctcgctctgttg

SEQ ID NO: 13327 - DNA, 27 bp, Unknown
  Description of Unknown: gRNA target site sequence
ttttgagagacagggtctcgctctgtt

SEQ ID NO: 13328 - DNA, 27 bp, Unknown
  Description of Unknown: gRNA target site sequence
tttttgagagacagggtctcgctctgt

SEQ ID NO: 13329 - DNA, 27 bp, Unknown
  Description of Unknown: gRNA target site sequence
ttttttgagagacagggtctcgctctg

SEQ ID NO: 13330 - DNA, 27 bp, Unknown
  Description of Unknown: gRNA target site sequence
tttcttttttgagagacagggtctcgc

SEQ ID NO: 13331 - DNA, 27 bp, Unknown
  Description of Unknown: gRNA target site sequence
ttttcttttttgagagacagggtctcg

SEQ ID NO: 13332 - DNA, 27 bp, Unknown
  Description of Unknown: gRNA target site sequence
tttttcttttttgagagacagggtctc

SEQ ID NO: 13333 - DNA, 27 bp, Unknown
  Description of Unknown: gRNA target site sequence
ttttttcttttttgagagacagggtct

SEQ ID NO: 13334 - DNA, 27 bp, Unknown
  Description of Unknown: gRNA target site sequence
tttttttcttttttgagagacagggtc

SEQ ID NO: 13335 - DNA, 27 bp, Unknown
  Description of Unknown: gRNA target site sequence
ttttttttcttttttgagagacagggt

SEQ ID NO: 13336 - DNA, 27 bp, Unknown
  Description of Unknown: gRNA target site sequence
tttttttttcttttttgagagacaggg

SEQ ID NO: 13337 - DNA, 27 bp, Unknown
  Description of Unknown: gRNA target site sequence
ttttttttttcttttttgagagacagg

SEQ ID NO: 13338 - DNA, 27 bp, Unknown
  Description of Unknown: gRNA target site sequence
tttttttttttcttttttgagagacag

SEQ ID NO: 13339 - DNA, 27 bp, Unknown
  Description of Unknown: gRNA target site sequence
ttttttttttttcttttttgagagaca

SEQ ID NO: 13340 - DNA, 27 bp, Unknown
  Description of Unknown: gRNA target site sequence
tttttttttttttcttttttgagagac

SEQ ID NO: 13341 - DNA, 27 bp, Unknown
  Description of Unknown: gRNA target site sequence
ttttttttttttttcttttttgagaga

SEQ ID NO: 13342 - DNA, 27 bp, Unknown
  Description of Unknown: gRNA target site sequence
tttttttttttttttcttttttgagag

SEQ ID NO: 13343 - DNA, 27 bp, Unknown
  Description of Unknown: gRNA target site sequence
tttctttttttttttttttcttttttg

SEQ ID NO: 13344 - DNA, 27 bp, Unknown
  Description of Unknown: gRNA target site sequence
tttctctttctttttttttttttttct

SEQ ID NO: 13345 - DNA, 27 bp, Unknown
  Description of Unknown: gRNA target site sequence
ttttctctttctttttttttttttttc

SEQ ID NO: 13346 - DNA, 27 bp, Unknown
  Description of Unknown: gRNA target site sequence
tttcttttctctttctttttttttttt

SEQ ID NO: 13347 - DNA, 27 bp, Unknown
  Description of Unknown: gRNA target site sequence
ttttcttttctctttcttttttttttt

SEQ ID NO: 13348 - DNA, 27 bp, Unknown
  Description of Unknown: gRNA target site sequence
tttcttttcttttctctttcttttttt

SEQ ID NO: 13349 - DNA, 27 bp, Unknown
  Description of Unknown: gRNA target site sequence
tttctttcttttcttttctctttcttt

SEQ ID NO: 13350 - DNA, 27 bp, Unknown
  Description of Unknown: gRNA target site sequence
tttacagctcccctgactgacaaacct

SEQ ID NO: 13351 - DNA, 27 bp, Unknown
  Description of Unknown: gRNA target site sequence
ttttacagctcccctgactgacaaacc

SEQ ID NO: 13352 - DNA, 27 bp, Unknown
  Description of Unknown: gRNA target site sequence
tttgtcagtcaggggagctgtaaaacc

SEQ ID NO: 13353 - DNA, 27 bp, Unknown
  Description of Unknown: gRNA target site sequence
tttattaatggttttacagctcccctg

SEQ ID NO: 13354 - DNA, 27 bp, Unknown
  Description of Unknown: gRNA target site sequence
tttctaagtacctggcaatacactaag

SEQ ID NO: 13355 - DNA, 27 bp, Unknown
  Description of Unknown: gRNA target site sequence
tttgccagaggaaaaggtgagcgcgct

SEQ ID NO: 13356 - DNA, 27 bp, Unknown
  Description of Unknown: gRNA target site sequence
ttttgccagaggaaaaggtgagcgcgc

SEQ ID NO: 13357 - DNA, 27 bp, Unknown
  Description of Unknown: gRNA target site sequence
ttttcctctggcaaaacatgatcgaaa

SEQ ID NO: 13358 - DNA, 27 bp, Unknown
  Description of Unknown: gRNA target site sequence
tttcgatcatgttttgccagaggaaaa

SEQ ID NO: 13359 - DNA, 27 bp, Unknown
  Description of Unknown: gRNA target site sequence
tttcctctggcaaaacatgatcgaaag

SEQ ID NO: 13360 - DNA, 27 bp, Unknown
  Description of Unknown: gRNA target site sequence
tttctcatgatcaaaacattctgcttt

SEQ ID NO: 13361 - DNA, 27 bp, Unknown
  Description of Unknown: gRNA target site sequence
ttttctcatgatcaaaacattctgctt

SEQ ID NO: 13362 - DNA, 27 bp, Unknown
  Description of Unknown: gRNA target site sequence
ttttgatcatgagaaaattgcatttaa

SEQ ID NO: 13363 - DNA, 27 bp, Unknown
  Description of Unknown: gRNA target site sequence
tttgatcatgagaaaattgcatttaat

SEQ ID NO: 13364 - DNA, 27 bp, Unknown
  Description of Unknown: gRNA target site sequence
tttaatttgaatacaatttatttacaa

SEQ ID NO: 13365 - DNA, 27 bp, Unknown
  Description of Unknown: gRNA target site sequence
tttgaatacaatttatttacaacataa

SEQ ID NO: 13366 - DNA, 27 bp, Unknown
  Description of Unknown: gRNA target site sequence
tttatgttgtaaataaattgtattcaa

SEQ ID NO: 13367 - DNA, 27 bp, Unknown
  Description of Unknown: gRNA target site sequence
tttatttacaacataaaggataatgta

SEQ ID NO: 13368 - DNA, 27 bp, Unknown
  Description of Unknown: gRNA target site sequence
tttacaacataaaggataatgtatata

SEQ ID NO: 13369 - DNA, 27 bp, Unknown
  Description of Unknown: gRNA target site sequence
tttgctggttatgttagatgtcatttt

SEQ ID NO: 13370 - DNA, 27 bp, Unknown
  Description of Unknown: gRNA target site sequence
tttaaaatgacatctaacataaccagc

SEQ ID NO: 13371 - DNA, 27 bp, Unknown
  Description of Unknown: gRNA target site sequence
ttttaaaatgacatctaacataaccag

SEQ ID NO: 13372 - DNA, 27 bp, Unknown
  Description of Unknown: gRNA target site sequence
tttttaaaatgacatctaacataacca

SEQ ID NO: 13373 - DNA, 27 bp, Unknown
  Description of Unknown: gRNA target site sequence
ttttttaaaatgacatctaacataacc

SEQ ID NO: 13374 - DNA, 27 bp, Unknown
  Description of Unknown: gRNA target site sequence
ttttaaaaaataacaatctgatattta

SEQ ID NO: 13375 - DNA, 27 bp, Unknown
  Description of Unknown: gRNA target site sequence
tttaaaaaataacaatctgatatttaa

SEQ ID NO: 13376 - DNA, 27 bp, Unknown
  Description of Unknown: gRNA target site sequence
tttaaatatcagattgttattttttaa

SEQ ID NO: 13377 - DNA, 27 bp, Unknown
  Description of Unknown: gRNA target site sequence
ttttaaatatcagattgttatttttta

SEQ ID NO: 13378 - DNA, 27 bp, Unknown
  Description of Unknown: gRNA target site sequence
tttttaaatatcagattgttatttttt

SEQ ID NO: 13379 - DNA, 27 bp, Unknown
  Description of Unknown: gRNA target site sequence
ttttttaaatatcagattgttattttt

SEQ ID NO: 13380 - DNA, 27 bp, Unknown
  Description of Unknown: gRNA target site sequence
tttttttaaatatcagattgttatttt

SEQ ID NO: 13381 - DNA, 27 bp, Unknown
  Description of Unknown: gRNA target site sequence
ttttttttaaatatcagattgttattt

SEQ ID NO: 13382 - DNA, 27 bp, Unknown
  Description of Unknown: gRNA target site sequence
tttttttttaaatatcagattgttatt

SEQ ID NO: 13383 - DNA, 27 bp, Unknown
  Description of Unknown: gRNA target site sequence
tttcaaaataagatttttttttaaata

SEQ ID NO: 13384 - DNA, 27 bp, Unknown
  Description of Unknown: gRNA target site sequence
ttttcaaaataagatttttttttaaat

SEQ ID NO: 13385 - DNA, 27 bp, Unknown
  Description of Unknown: gRNA target site sequence
tttaaaaaaaaatcttattttgaaaat

SEQ ID NO: 13386 - DNA, 27 bp, Unknown
  Description of Unknown: gRNA target site sequence
tttggaaattttcaaaataagattttt

SEQ ID NO: 13387 - DNA, 27 bp, Unknown
  Description of Unknown: gRNA target site sequence
ttttgaaaatttccaaagtaatacatg

SEQ ID NO: 13388 - DNA, 27 bp, Unknown
  Description of Unknown: gRNA target site sequence
tttgaaaatttccaaagtaatacatgc

SEQ ID NO: 13389 - DNA, 27 bp, Unknown
  Description of Unknown: gRNA target site sequence
tttccaaagtaatacatgccatgcata

SEQ ID NO: 13390 - DNA, 27 bp, Unknown
  Description of Unknown: gRNA target site sequence
tttcttgtggtatcttccagaaatggt

SEQ ID NO: 13391 - DNA, 27 bp, Unknown
  Description of Unknown: gRNA target site sequence
tttctggaagataccacaagaaacatg

SEQ ID NO: 13392 - DNA, 27 bp, Unknown
  Description of Unknown: gRNA target site sequence
ttttcctcctctgacctgtgtgtgggt

SEQ ID NO: 13393 - DNA, 27 bp, Unknown
  Description of Unknown: gRNA target site sequence
tttcctcctctgacctgtgtgtgggtt

SEQ ID NO: 13394 - DNA, 27 bp, Unknown
  Description of Unknown: gRNA target site sequence
ttttgtttttgttttactgtgggcata

SEQ ID NO: 13395 - DNA, 27 bp, Unknown
  Description of Unknown: gRNA target site sequence
tttgtttttgttttactgtgggcataa

SEQ ID NO: 13396 - DNA, 27 bp, Unknown
  Description of Unknown: gRNA target site sequence
tttatgcccacagtaaaacaaaaacaa

SEQ ID NO: 13397 - DNA, 27 bp, Unknown
  Description of Unknown: gRNA target site sequence
tttttgttttactgtgggcataaatta

SEQ ID NO: 13398 - DNA, 27 bp, Unknown
  Description of Unknown: gRNA target site sequence
ttttgttttactgtgggcataaattaa

SEQ ID NO: 13399 - DNA, 27 bp, Unknown
  Description of Unknown: gRNA target site sequence
tttgttttactgtgggcataaattaat

SEQ ID NO: 13400 - DNA, 27 bp, Unknown
  Description of Unknown: gRNA target site sequence
ttttactgtgggcataaattaattttt

SEQ ID NO: 13401 - DNA, 27 bp, Unknown
  Description of Unknown: gRNA target site sequence
tttactgtgggcataaattaatttttc

SEQ ID NO: 13402 - DNA, 27 bp, Unknown
  Description of Unknown: gRNA target site sequence
tttttcagttaagttttggaagcttaa

SEQ ID NO: 13403 - DNA, 27 bp, Unknown
  Description of Unknown: gRNA target site sequence
ttttcagttaagttttggaagcttaaa

SEQ ID NO: 13404 - DNA, 27 bp, Unknown
  Description of Unknown: gRNA target site sequence
tttaagcttccaaaacttaactgaaaa

SEQ ID NO: 13405 - DNA, 27 bp, Unknown
  Description of Unknown: gRNA target site sequence
tttcagttaagttttggaagcttaaat

SEQ ID NO: 13406 - DNA, 27 bp, Unknown
  Description of Unknown: gRNA target site sequence
ttttggaagcttaaataactctccaaa

SEQ ID NO: 13407 - DNA, 27 bp, Unknown
  Description of Unknown: gRNA target site sequence
tttggagagttatttaagcttccaaaa

SEQ ID NO: 13408 - DNA, 27 bp, Unknown
  Description of Unknown: gRNA target site sequence
tttggaagcttaaataactctccaaaa

SEQ ID NO: 13409 - DNA, 27 bp, Unknown
  Description of Unknown: gRNA target site sequence
ttttggagagttatttaagcttccaaa

SEQ ID NO: 13410 - DNA, 27 bp, Unknown
  Description of Unknown: gRNA target site sequence
tttatgacttttggagagttatttaag

SEQ ID NO: 13411 - DNA, 27 bp, Unknown
  Description of Unknown: gRNA target site sequence
tttgggctcaaccagttactggcttta

SEQ ID NO: 13412 - DNA, 27 bp, Unknown
  Description of Unknown: gRNA target site sequence
tttgaatttgggctcaaccagttactg

SEQ ID NO: 13413 - DNA, 27 bp, Unknown
  Description of Unknown: gRNA target site sequence
tttctaagaagaggacaagtatcagac

SEQ ID NO: 13414 - DNA, 27 bp, Unknown
  Description of Unknown: gRNA target site sequence
ttttctaagaagaggacaagtatcaga

SEQ ID NO: 13415 - DNA, 27 bp, Unknown
  Description of Unknown: gRNA target site sequence
tttgtgagagcatcactgtaatctttt

SEQ ID NO: 13416 - DNA, 27 bp, Unknown
  Description of Unknown: gRNA target site sequence
ttttgtgagagcatcactgtaatcttt

SEQ ID NO: 13417 - DNA, 27 bp, Unknown
  Description of Unknown: gRNA target site sequence
tttgagggaaggcggcaagattttgtg

SEQ ID NO: 13418 - DNA, 27 bp, Unknown
  Description of Unknown: gRNA target site sequence
tttaatatgttcttattattagaagct

SEQ ID NO: 13419 - DNA, 27 bp, Unknown
  Description of Unknown: gRNA target site sequence
tttgcatctgagcttctaataataaga

SEQ ID NO: 13420 - DNA, 27 bp, Unknown
  Description of Unknown: gRNA target site sequence
tttcataacattaaaagctaagagagc

SEQ ID NO: 13421 - DNA, 27 bp, Unknown
  Description of Unknown: gRNA target site sequence
ttttcataacattaaaagctaagagag

SEQ ID NO: 13422 - DNA, 27 bp, Unknown
  Description of Unknown: gRNA target site sequence
tttttcataacattaaaagctaagaga

SEQ ID NO: 13423 - DNA, 27 bp, Unknown
  Description of Unknown: gRNA target site sequence
ttttttcataacattaaaagctaagag

SEQ ID NO: 13424 - DNA, 27 bp, Unknown
  Description of Unknown: gRNA target site sequence
tttttttcataacattaaaagctaaga

SEQ ID NO: 13425 - DNA, 27 bp, Unknown
  Description of Unknown: gRNA target site sequence
ttttaatgttatgaaaaaaatcaggtc

SEQ ID NO: 13426 - DNA, 27 bp, Unknown
  Description of Unknown: gRNA target site sequence
tttaatgttatgaaaaaaatcaggtct

SEQ ID NO: 13427 - DNA, 27 bp, Unknown
  Description of Unknown: gRNA target site sequence
tttccttaatgatagggtgtttctaga

SEQ ID NO: 13428 - DNA, 27 bp, Unknown
  Description of Unknown: gRNA target site sequence
tttctagagagatatatctggtcaagg

SEQ ID NO: 13429 - DNA, 27 bp, Unknown
  Description of Unknown: gRNA target site sequence
ttttagtgatcatgtaccctgaatata

SEQ ID NO: 13430 - DNA, 27 bp, Unknown
  Description of Unknown: gRNA target site sequence
tttagtgatcatgtaccctgaatataa

SEQ ID NO: 13431 - DNA, 27 bp, Unknown
  Description of Unknown: gRNA target site sequence
tttaaatacacttatattcagggtaca

SEQ ID NO: 13432 - DNA, 27 bp, Unknown
  Description of Unknown: gRNA target site sequence
ttttaaatacacttatattcagggtac

SEQ ID NO: 13433 - DNA, 27 bp, Unknown
  Description of Unknown: gRNA target site sequence
tttaaaagaattttatacacatatatt

SEQ ID NO: 13434 - DNA, 27 bp, Unknown
  Description of Unknown: gRNA target site sequence
ttttatacacatatatttagtgtcaat

SEQ ID NO: 13435 - DNA, 27 bp, Unknown
  Description of Unknown: gRNA target site sequence
tttatacacatatatttagtgtcaatc

SEQ ID NO: 13436 - DNA, 27 bp, Unknown
  Description of Unknown: gRNA target site sequence
tttagtgtcaatctgtatatttagtag

SEQ ID NO: 13437 - DNA, 27 bp, Unknown
  Description of Unknown: gRNA target site sequence
tttagtagcactaacacttctcttcat

SEQ ID NO: 13438 - DNA, 27 bp, Unknown
  Description of Unknown: gRNA target site sequence
tttcattgaaaatgaagagaagtgtta

SEQ ID NO: 13439 - DNA, 27 bp, Unknown
  Description of Unknown: gRNA target site sequence
ttttcattgaaaatgaagagaagtgtt

SEQ ID NO: 13440 - DNA, 27 bp, Unknown
  Description of Unknown: gRNA target site sequence
tttttcattgaaaatgaagagaagtgt

SEQ ID NO: 13441 - DNA, 27 bp, Unknown
  Description of Unknown: gRNA target site sequence
ttttcaatgaaaaatatagagtttata

SEQ ID NO: 13442 - DNA, 27 bp, Unknown
  Description of Unknown: gRNA target site sequence
tttcaatgaaaaatatagagtttataa

SEQ ID NO: 13443 - DNA, 27 bp, Unknown
  Description of Unknown: gRNA target site sequence
tttataatattttcttcccacttcccc

SEQ ID NO: 13444 - DNA, 27 bp, Unknown
  Description of Unknown: gRNA target site sequence
ttttcttcccacttccccatggatggt

SEQ ID NO: 13445 - DNA, 27 bp, Unknown
  Description of Unknown: gRNA target site sequence
tttcttcccacttccccatggatggtc

SEQ ID NO: 13446 - DNA, 27 bp, Unknown
  Description of Unknown: gRNA target site sequence
tttccaaaatgagaggcatgactagac

SEQ ID NO: 13447 - DNA, 27 bp, Unknown
  Description of Unknown: gRNA target site sequence
tttcagaaacagtactttccaaaatga

SEQ ID NO: 13448 - DNA, 27 bp, Unknown
  Description of Unknown: gRNA target site sequence
ttttggaaagtactgtttctgaaacat

SEQ ID NO: 13449 - DNA, 27 bp, Unknown
  Description of Unknown: gRNA target site sequence
tttggaaagtactgtttctgaaacatt

SEQ ID NO: 13450 - DNA, 27 bp, Unknown
  Description of Unknown: gRNA target site sequence
tttctgaaacattaggcaatatattcc

SEQ ID NO: 13451 - DNA, 27 bp, Unknown
  Description of Unknown: gRNA target site sequence
tttacagcaatcacctgtggatgctaa

SEQ ID NO: 13452 - DNA, 27 bp, Unknown
  Description of Unknown: gRNA target site sequence
tttaattagcatccacaggtgattgct

SEQ ID NO: 13453 - DNA, 27 bp, Unknown
  Description of Unknown: gRNA target site sequence
ttttaattagcatccacaggtgattgc

SEQ ID NO: 13454 - DNA, 27 bp, Unknown
  Description of Unknown: gRNA target site sequence
tttgcgttttaattagcatccacaggt

SEQ ID NO: 13455 - DNA, 27 bp, Unknown
  Description of Unknown: gRNA target site sequence
tttccattatgatcaaatggagtaatg

SEQ ID NO: 13456 - DNA, 27 bp, Unknown
  Description of Unknown: gRNA target site sequence
tttgatcataatggaaagtatgttctg

SEQ ID NO: 13457 - DNA, 27 bp, Unknown
  Description of Unknown: gRNA target site sequence
tttgccatagtcctcacctatccctgt

SEQ ID NO: 13458 - DNA, 27 bp, Unknown
  Description of Unknown: gRNA target site sequence
ttttatcgggtccaactcaaccattta

SEQ ID NO: 13459 - DNA, 27 bp, Unknown
  Description of Unknown: gRNA target site sequence
tttatcgggtccaactcaaccatttaa

SEQ ID NO: 13460 - DNA, 27 bp, Unknown
  Description of Unknown: gRNA target site sequence
tttaaggtatttgccagctcttgtatg

SEQ ID NO: 13461 - DNA, 27 bp, Unknown
  Description of Unknown: gRNA target site sequence
tttgccagctcttgtatgcatttaggt

SEQ ID NO: 13462 - DNA, 27 bp, Unknown
  Description of Unknown: gRNA target site sequence
tttaggttttgtttctttgttttttag

SEQ ID NO: 13463 - DNA, 27 bp, Unknown
  Description of Unknown: gRNA target site sequence
ttttgtttctttgttttttagctcatg

SEQ ID NO: 13464 - DNA, 27 bp, Unknown
  Description of Unknown: gRNA target site sequence
tttgtttctttgttttttagctcatga

SEQ ID NO: 13465 - DNA, 27 bp, Unknown
  Description of Unknown: gRNA target site sequence
tttcatgagctaaaaaacaaagaaaca

SEQ ID NO: 13466 - DNA, 27 bp, Unknown
  Description of Unknown: gRNA target site sequence
tttctttgttttttagctcatgaaatt

SEQ ID NO: 13467 - DNA, 27 bp, Unknown
  Description of Unknown: gRNA target site sequence
tttgttttttagctcatgaaattaggt

SEQ ID NO: 13468 - DNA, 27 bp, Unknown
  Description of Unknown: gRNA target site sequence
ttttttagctcatgaaattaggtacaa

SEQ ID NO: 13469 - DNA, 27 bp, Unknown
  Description of Unknown: gRNA target site sequence
tttttagctcatgaaattaggtacaaa

SEQ ID NO: 13470 - DNA, 27 bp, Unknown
  Description of Unknown: gRNA target site sequence
tttgtacctaatttcatgagctaaaaa

SEQ ID NO: 13471 - DNA, 27 bp, Unknown
  Description of Unknown: gRNA target site sequence
ttttagctcatgaaattaggtacaaag

SEQ ID NO: 13472 - DNA, 27 bp, Unknown
  Description of Unknown: gRNA target site sequence
tttagctcatgaaattaggtacaaagt

SEQ ID NO: 13473 - DNA, 27 bp, Unknown
  Description of Unknown: gRNA target site sequence
tttatatgccagacccctctctgactt

SEQ ID NO: 13474 - DNA, 27 bp, Unknown
  Description of Unknown: gRNA target site sequence
ttttatatgccagacccctctctgact

SEQ ID NO: 13475 - DNA, 27 bp, Unknown
  Description of Unknown: gRNA target site sequence
tttctgctgaggttttatatgccagac

SEQ ID NO: 13476 - DNA, 27 bp, Unknown
  Description of Unknown: gRNA target site sequence
tttatttctgctgaggttttatatgcc

SEQ ID NO: 13477 - DNA, 27 bp, Unknown
  Description of Unknown: gRNA target site sequence
ttttgttgtttggtaagaacatacctt

SEQ ID NO: 13478 - DNA, 27 bp, Unknown
  Description of Unknown: gRNA target site sequence
tttgttgtttggtaagaacataccttg

SEQ ID NO: 13479 - DNA, 27 bp, Unknown
  Description of Unknown: gRNA target site sequence
tttggtaagaacataccttgggttggt

SEQ ID NO: 13480 - DNA, 27 bp, Unknown
  Description of Unknown: gRNA target site sequence
tttgggaggccaaggcaggctgatcac

SEQ ID NO: 13481 - DNA, 27 bp, Unknown
  Description of Unknown: gRNA target site sequence
tttcaccatgttggccaggctggtctt

SEQ ID NO: 13482 - DNA, 27 bp, Unknown
  Description of Unknown: gRNA target site sequence
tttcagtagagacgggatttcaccatg

SEQ ID NO: 13483 - DNA, 27 bp, Unknown
  Description of Unknown: gRNA target site sequence
ttttcagtagagacgggatttcaccat

SEQ ID NO: 13484 - DNA, 27 bp, Unknown
  Description of Unknown: gRNA target site sequence
tttgtattttcagtagagacgggattt

SEQ ID NO: 13485 - DNA, 27 bp, Unknown
  Description of Unknown: gRNA target site sequence
ttttgtattttcagtagagacgggatt

SEQ ID NO: 13486 - DNA, 27 bp, Unknown
  Description of Unknown: gRNA target site sequence
tttttgtattttcagtagagacgggat

SEQ ID NO: 13487 - DNA, 27 bp, Unknown
  Description of Unknown: gRNA target site sequence
tttgggatggaatctcattccattgcc

SEQ ID NO: 13488 - DNA, 27 bp, Unknown
  Description of Unknown: gRNA target site sequence
ttttgggatggaatctcattccattgc

SEQ ID NO: 13489 - DNA, 27 bp, Unknown
  Description of Unknown: gRNA target site sequence
tttttgggatggaatctcattccattg

SEQ ID NO: 13490 - DNA, 27 bp, Unknown
  Description of Unknown: gRNA target site sequence
ttttttgggatggaatctcattccatt

SEQ ID NO: 13491 - DNA, 27 bp, Unknown
  Description of Unknown: gRNA target site sequence
tttattttttgggatggaatctcattc

SEQ ID NO: 13492 - DNA, 27 bp, Unknown
  Description of Unknown: gRNA target site sequence
ttttattttttgggatggaatctcatt

SEQ ID NO: 13493 - DNA, 27 bp, Unknown
  Description of Unknown: gRNA target site sequence
tttttattttttgggatggaatctcat

SEQ ID NO: 13494 - DNA, 27 bp, Unknown
  Description of Unknown: gRNA target site sequence
ttttttattttttgggatggaatctca

SEQ ID NO: 13495 - DNA, 27 bp, Unknown
  Description of Unknown: gRNA target site sequence
tttttttattttttgggatggaatctc

SEQ ID NO: 13496 - DNA, 27 bp, Unknown
  Description of Unknown: gRNA target site sequence
tttatttttttattttttgggatggaa

SEQ ID NO: 13497 - DNA, 27 bp, Unknown
  Description of Unknown: gRNA target site sequence
ttttatttttttattttttgggatgga

SEQ ID NO: 13498 - DNA, 27 bp, Unknown
  Description of Unknown: gRNA target site sequence
tttttatttttttattttttgggatgg

SEQ ID NO: 13499 - DNA, 27 bp, Unknown
  Description of Unknown: gRNA target site sequence
ttttttatttttttattttttgggatg

SEQ ID NO: 13500 - DNA, 27 bp, Unknown
  Description of Unknown: gRNA target site sequence
tttttttatttttttattttttgggat

SEQ ID NO: 13501 - DNA, 27 bp, Unknown
  Description of Unknown: gRNA target site sequence
tttatttttttatttttttattttttg

SEQ ID NO: 13502 - DNA, 27 bp, Unknown
  Description of Unknown: gRNA target site sequence
tttctaaactgtatgaagtgtctagta

SEQ ID NO: 13503 - DNA, 27 bp, Unknown
  Description of Unknown: gRNA target site sequence
ttttctaaactgtatgaagtgtctagt

SEQ ID NO: 13504 - DNA, 27 bp, Unknown
  Description of Unknown: gRNA target site sequence
tttagaaaatcagatgggtgtagatca

SEQ ID NO: 13505 - DNA, 27 bp, Unknown
  Description of Unknown: gRNA target site sequence
tttggttcctgctcctgccttgatcta

SEQ ID NO: 13506 - DNA, 27 bp, Unknown
  Description of Unknown: gRNA target site sequence
ttttggttcctgctcctgccttgatct

SEQ ID NO: 13507 - DNA, 27 bp, Unknown
  Description of Unknown: gRNA target site sequence
tttttggttcctgctcctgccttgatc

SEQ ID NO: 13508 - DNA, 27 bp, Unknown
  Description of Unknown: gRNA target site sequence
tttctttttggttcctgctcctgcctt

SEQ ID NO: 13509 - DNA, 27 bp, Unknown
  Description of Unknown: gRNA target site sequence
tttatgcctttctttttggttcctgct

SEQ ID NO: 13510 - DNA, 27 bp, Unknown
  Description of Unknown: gRNA target site sequence
tttcttatgtttatgcctttctttttg

SEQ ID NO: 13511 - DNA, 27 bp, Unknown
  Description of Unknown: gRNA target site sequence
ttttcttatgtttatgcctttcttttt

SEQ ID NO: 13512 - DNA, 27 bp, Unknown
  Description of Unknown: gRNA target site sequence
tttttcttatgtttatgcctttctttt

SEQ ID NO: 13513 - DNA, 27 bp, Unknown
  Description of Unknown: gRNA target site sequence
ttttttcttatgtttatgcctttcttt

SEQ ID NO: 13514 - DNA, 27 bp, Unknown
  Description of Unknown: gRNA target site sequence
tttttttcttatgtttatgcctttctt

SEQ ID NO: 13515 - DNA, 27 bp, Unknown
  Description of Unknown: gRNA target site sequence
ttttttttcttatgtttatgcctttct

SEQ ID NO: 13516 - DNA, 27 bp, Unknown
  Description of Unknown: gRNA target site sequence
tttccaccccttccattttttttctta

SEQ ID NO: 13517 - DNA, 27 bp, Unknown
  Description of Unknown: gRNA target site sequence
tttgatgggggctattatgaactgaga

SEQ ID NO: 13518 - DNA, 27 bp, Unknown
  Description of Unknown: gRNA target site sequence
tttctcagttcataatagcccccatca

SEQ ID NO: 13519 - DNA, 27 bp, Unknown
  Description of Unknown: gRNA target site sequence
tttcaaagttcatttctcagttcataa

SEQ ID NO: 13520 - DNA, 27 bp, Unknown
  Description of Unknown: gRNA target site sequence
ttttcaaagttcatttctcagttcata

SEQ ID NO: 13521 - DNA, 27 bp, Unknown
  Description of Unknown: gRNA target site sequence
tttggccccaagatacttttcaaagtt

SEQ ID NO: 13522 - DNA, 27 bp, Unknown
  Description of Unknown: gRNA target site sequence
tttgaaaagtatcttggggccaaatca

SEQ ID NO: 13523 - DNA, 27 bp, Unknown
  Description of Unknown: gRNA target site sequence
tttctctggaggctctcaaggacttct

SEQ ID NO: 13524 - DNA, 27 bp, Unknown
  Description of Unknown: gRNA target site sequence
tttaagagcctttctctggaggctctc

SEQ ID NO: 13525 - DNA, 27 bp, Unknown
  Description of Unknown: gRNA target site sequence
ttttaagagcctttctctggaggctct

SEQ ID NO: 13526 - DNA, 27 bp, Unknown
  Description of Unknown: gRNA target site sequence
tttttaagagcctttctctggaggctc

SEQ ID NO: 13527 - DNA, 27 bp, Unknown
  Description of Unknown: gRNA target site sequence
tttctagcagtatcttctgtcactgga

SEQ ID NO: 13528 - DNA, 27 bp, Unknown
  Description of Unknown: gRNA target site sequence
tttctagcagatttctagcagtatctt

SEQ ID NO: 13529 - DNA, 27 bp, Unknown
  Description of Unknown: gRNA target site sequence
ttttctagcagatttctagcagtatct

SEQ ID NO: 13530 - DNA, 27 bp, Unknown
  Description of Unknown: gRNA target site sequence
tttttctagcagatttctagcagtatc

SEQ ID NO: 13531 - DNA, 27 bp, Unknown
  Description of Unknown: gRNA target site sequence
ttttttctagcagatttctagcagtat

SEQ ID NO: 13532 - DNA, 27 bp, Unknown
  Description of Unknown: gRNA target site sequence
tttttttctagcagatttctagcagta

SEQ ID NO: 13533 - DNA, 27 bp, Unknown
  Description of Unknown: gRNA target site sequence
ttttttttctagcagatttctagcagt

SEQ ID NO: 13534 - DNA, 27 bp, Unknown
  Description of Unknown: gRNA target site sequence
tttgttttttttctagcagatttctag

SEQ ID NO: 13535 - DNA, 27 bp, Unknown
  Description of Unknown: gRNA target site sequence
ttttgttttttttctagcagatttcta

SEQ ID NO: 13536 - DNA, 27 bp, Unknown
  Description of Unknown: gRNA target site sequence
tttttgttttttttctagcagatttct

SEQ ID NO: 13537 - DNA, 27 bp, Unknown
  Description of Unknown: gRNA target site sequence
ttttttgttttttttctagcagatttc

SEQ ID NO: 13538 - DNA, 27 bp, Unknown
  Description of Unknown: gRNA target site sequence
tttccctcataattcctctatacatgc

SEQ ID NO: 13539 - DNA, 27 bp, Unknown
  Description of Unknown: gRNA target site sequence
tttgaagaataaaccgtgacttggtat

SEQ ID NO: 13540 - DNA, 27 bp, Unknown
  Description of Unknown: gRNA target site sequence
ttttgaagaataaaccgtgacttggta

SEQ ID NO: 13541 - DNA, 27 bp, Unknown
  Description of Unknown: gRNA target site sequence
tttattcttcaaaatggaggtggcttg

SEQ ID NO: 13542 - DNA, 27 bp, Unknown
  Description of Unknown: gRNA target site sequence
tttccactctggccaaatgagcttcca

SEQ ID NO: 13543 - DNA, 27 bp, Unknown
  Description of Unknown: gRNA target site sequence
tttggccagagtggaaatggaattggg

SEQ ID NO: 13544 - DNA, 27 bp, Unknown
  Description of Unknown: gRNA target site sequence
tttctcccaattccatttccactctgg

SEQ ID NO: 13545 - DNA, 27 bp, Unknown
  Description of Unknown: gRNA target site sequence
tttggtcatcgatttctcccaattcca

SEQ ID NO: 13546 - DNA, 27 bp, Unknown
  Description of Unknown: gRNA target site sequence
tttacatttggtcatcgatttctccca

SEQ ID NO: 13547 - DNA, 27 bp, Unknown
  Description of Unknown: gRNA target site sequence
tttcacttggggctaacttggtgtcaa

SEQ ID NO: 13548 - DNA, 27 bp, Unknown
  Description of Unknown: gRNA target site sequence
ttttcccgatattcctcaggtactcca

SEQ ID NO: 13549 - DNA, 27 bp, Unknown
  Description of Unknown: gRNA target site sequence
tttcccgatattcctcaggtactccaa

SEQ ID NO: 13550 - DNA, 27 bp, Unknown
  Description of Unknown: gRNA target site sequence
tttggagtacctgaggaatatcgggaa

SEQ ID NO: 13551 - DNA, 27 bp, Unknown
  Description of Unknown: gRNA target site sequence
tttactcacgtcatccagcagagaatg

SEQ ID NO: 13552 - DNA, 27 bp, Unknown
  Description of Unknown: gRNA target site sequence
tttccattctctgctggatgacgtgag

SEQ ID NO: 13553 - DNA, 27 bp, Unknown
  Description of Unknown: gRNA target site sequence
tttgactttccattctctgctggatga

SEQ ID NO: 13554 - DNA, 27 bp, Unknown
  Description of Unknown: gRNA target site sequence
tttcctgaattgctatgtgtctgggtt

SEQ ID NO: 13555 - DNA, 27 bp, Unknown
  Description of Unknown: gRNA target site sequence
tttcatccatccgacattgaagttgac

SEQ ID NO: 13556 - DNA, 27 bp, Unknown
  Description of Unknown: gRNA target site sequence
tttcaattctctctccattcttcagta

SEQ ID NO: 13557 - DNA, 27 bp, Unknown
  Description of Unknown: gRNA target site sequence
ttttcaattctctctccattcttcagt

SEQ ID NO: 13558 - DNA, 27 bp, Unknown
  Description of Unknown: gRNA target site sequence
tttttcaattctctctccattcttcag

SEQ ID NO: 13559 - DNA, 27 bp, Unknown
  Description of Unknown: gRNA target site sequence
tttcagcaaggactggtctttctatct

SEQ ID NO: 13560 - DNA, 27 bp, Unknown
  Description of Unknown: gRNA target site sequence
tttctatctcttgtactacactgaatt

SEQ ID NO: 13561 - DNA, 27 bp, Unknown
  Description of Unknown: gRNA target site sequence
tttcagtgggggtgaattcagtgtagt

SEQ ID NO: 13562 - DNA, 27 bp, Unknown
  Description of Unknown: gRNA target site sequence
ttttcagtgggggtgaattcagtgtag

SEQ ID NO: 13563 - DNA, 27 bp, Unknown
  Description of Unknown: gRNA target site sequence
tttttcagtgggggtgaattcagtgta

SEQ ID NO: 13564 - DNA, 27 bp, Unknown
  Description of Unknown: gRNA target site sequence
tttgtcacagcccaagatagttaagtg

SEQ ID NO: 13565 - DNA, 27 bp, Unknown
  Description of Unknown: gRNA target site sequence
tttcagcagcttacaaaagaatgtaag

SEQ ID NO: 13566 - DNA, 27 bp, Unknown
  Description of Unknown: gRNA target site sequence
ttttgtaagctgctgaaagttgtgtat

SEQ ID NO: 13567 - DNA, 27 bp, Unknown
  Description of Unknown: gRNA target site sequence
tttgtaagctgctgaaagttgtgtatg

SEQ ID NO: 13568 - DNA, 27 bp, Unknown
  Description of Unknown: gRNA target site sequence
tttatgatatgactactcatacacaac

SEQ ID NO: 13569 - DNA, 27 bp, Unknown
  Description of Unknown: gRNA target site sequence
tttatatcaaagcagctttatgatatg

SEQ ID NO: 13570 - DNA, 27 bp, Unknown
  Description of Unknown: gRNA target site sequence
ttttatatcaaagcagctttatgatat

SEQ ID NO: 13571 - DNA, 27 bp, Unknown
  Description of Unknown: gRNA target site sequence
tttttatatcaaagcagctttatgata

SEQ ID NO: 13572 - DNA, 27 bp, Unknown
  Description of Unknown: gRNA target site sequence
ttttttatatcaaagcagctttatgat

SEQ ID NO: 13573 - DNA, 27 bp, Unknown
  Description of Unknown: gRNA target site sequence
tttgatataaaaaaggtctatggccat

SEQ ID NO: 13574 - DNA, 27 bp, Unknown
  Description of Unknown: gRNA target site sequence
tttatatcagatgggatgggactcatt

SEQ ID NO: 13575 - DNA, 27 bp, Unknown
  Description of Unknown: gRNA target site sequence
tttaagaacattccctgacaatcccaa

SEQ ID NO: 13576 - DNA, 27 bp, Unknown
  Description of Unknown: gRNA target site sequence
tttctgaaccagtagtttccctgcagt

SEQ ID NO: 13577 - DNA, 27 bp, Unknown
  Description of Unknown: gRNA target site sequence
tttccctgcagttgagcagggagcagc

SEQ ID NO: 13578 - DNA, 27 bp, Unknown
  Description of Unknown: gRNA target site sequence
tttgtgcaagtgctgctgctgctccct

SEQ ID NO: 13579 - DNA, 27 bp, Unknown
  Description of Unknown: gRNA target site sequence
ttttgtggcagcttcaggtatatttag

SEQ ID NO: 13580 - DNA, 27 bp, Unknown
  Description of Unknown: gRNA target site sequence
tttgtggcagcttcaggtatatttagc

SEQ ID NO: 13581 - DNA, 27 bp, Unknown
  Description of Unknown: gRNA target site sequence
tttagcactgaacgaacatctcaagaa

SEQ ID NO: 13582 - DNA, 27 bp, Unknown
  Description of Unknown: gRNA target site sequence
tttgtttgtaagtcctgctgtcctagc

SEQ ID NO: 13583 - DNA, 27 bp, Unknown
  Description of Unknown: gRNA target site sequence
tttgtaagtcctgctgtcctagcatcc

SEQ ID NO: 13584 - DNA, 27 bp, Unknown
  Description of Unknown: gRNA target site sequence
tttctggctggattggtatctgaggct

SEQ ID NO: 13585 - DNA, 27 bp, Unknown
  Description of Unknown: gRNA target site sequence
tttagagctacccagcaggaacaagcc

SEQ ID NO: 13586 - DNA, 27 bp, Unknown
  Description of Unknown: gRNA target site sequence
tttctaaccattttagacatttgttag

SEQ ID NO: 13587 - DNA, 27 bp, Unknown
  Description of Unknown: gRNA target site sequence
ttttagacatttgttagtacatggtat

SEQ ID NO: 13588 - DNA, 27 bp, Unknown
  Description of Unknown: gRNA target site sequence
tttagacatttgttagtacatggtatt

SEQ ID NO: 13589 - DNA, 27 bp, Unknown
  Description of Unknown: gRNA target site sequence
tttaaaataccatgtactaacaaatgt

SEQ ID NO: 13590 - DNA, 27 bp, Unknown
  Description of Unknown: gRNA target site sequence
ttttaaaataccatgtactaacaaatg

SEQ ID NO: 13591 - DNA, 27 bp, Unknown
  Description of Unknown: gRNA target site sequence
tttgttagtacatggtattttaaaagt

SEQ ID NO: 13592 - DNA, 27 bp, Unknown
  Description of Unknown: gRNA target site sequence
tttacttttaaaataccatgtactaac

SEQ ID NO: 13593 - DNA, 27 bp, Unknown
  Description of Unknown: gRNA target site sequence
ttttacttttaaaataccatgtactaa

SEQ ID NO: 13594 - DNA, 27 bp, Unknown
  Description of Unknown: gRNA target site sequence
ttttaaaagtaaaacttaatgtcttcc

SEQ ID NO: 13595 - DNA, 27 bp, Unknown
  Description of Unknown: gRNA target site sequence
tttaaaagtaaaacttaatgtcttcct

SEQ ID NO: 13596 - DNA, 27 bp, Unknown
  Description of Unknown: gRNA target site sequence
ttttttttctccactgtctttttcata

SEQ ID NO: 13597 - DNA, 27 bp, Unknown
  Description of Unknown: gRNA target site sequence
tttttttctccactgtctttttcatag

SEQ ID NO: 13598 - DNA, 27 bp, Unknown
  Description of Unknown: gRNA target site sequence
ttttttctccactgtctttttcataga

SEQ ID NO: 13599 - DNA, 27 bp, Unknown
  Description of Unknown: gRNA target site sequence
tttttctccactgtctttttcatagat

SEQ ID NO: 13600 - DNA, 27 bp, Unknown
  Description of Unknown: gRNA target site sequence
ttttctccactgtctttttcatagatc

SEQ ID NO: 13601 - DNA, 27 bp, Unknown
  Description of Unknown: gRNA target site sequence
tttctccactgtctttttcatagatcg

SEQ ID NO: 13602 - DNA, 27 bp, Unknown
  Description of Unknown: gRNA target site sequence
tttttcatagatcgagacatgtaagca

SEQ ID NO: 13603 - DNA, 27 bp, Unknown
  Description of Unknown: gRNA target site sequence
ttttcatagatcgagacatgtaagcag

SEQ ID NO: 13604 - DNA, 27 bp, Unknown
  Description of Unknown: gRNA target site sequence
tttcatagatcgagacatgtaagcagc

SEQ ID NO: 13605 - DNA, 27 bp, Unknown
  Description of Unknown: gRNA target site sequence
tttctcaaggtcaaaaacttacctcca

SEQ ID NO: 13606 - DNA, 27 bp, Unknown
  Description of Unknown: gRNA target site sequence
ttttctcaaggtcaaaaacttacctcc

SEQ ID NO: 13607 - DNA, 27 bp, Unknown
  Description of Unknown: gRNA target site sequence
tttttgaccttgagaaaatgtttttgt

SEQ ID NO: 13608 - DNA, 27 bp, Unknown
  Description of Unknown: gRNA target site sequence
ttttgaccttgagaaaatgtttttgtt

SEQ ID NO: 13609 - DNA, 27 bp, Unknown
  Description of Unknown: gRNA target site sequence
tttgaccttgagaaaatgtttttgttt

SEQ ID NO: 13610 - DNA, 27 bp, Unknown
  Description of Unknown: gRNA target site sequence
tttttgtttcactgtcctgaggactat

SEQ ID NO: 13611 - DNA, 27 bp, Unknown
  Description of Unknown: gRNA target site sequence
ttttgtttcactgtcctgaggactatt

SEQ ID NO: 13612 - DNA, 27 bp, Unknown
  Description of Unknown: gRNA target site sequence
tttgtttcactgtcctgaggactattt

SEQ ID NO: 13613 - DNA, 27 bp, Unknown
  Description of Unknown: gRNA target site sequence
tttcactgtcctgaggactatttatag

SEQ ID NO: 13614 - DNA, 27 bp, Unknown
  Description of Unknown: gRNA target site sequence
tttatagacagctctaacatgataacc

SEQ ID NO: 13615 - DNA, 27 bp, Unknown
  Description of Unknown: gRNA target site sequence
tttccctgctaaaatgttactctgtca

SEQ ID NO: 13616 - DNA, 27 bp, Unknown
  Description of Unknown: gRNA target site sequence
ttttagcagggaaagaagaatcctaca

SEQ ID NO: 13617 - DNA, 27 bp, Unknown
  Description of Unknown: gRNA target site sequence
tttagcagggaaagaagaatcctacag

SEQ ID NO: 13618 - DNA, 27 bp, Unknown
  Description of Unknown: gRNA target site sequence
tttgccctctctgtagagggtcagtaa

SEQ ID NO: 13619 - DNA, 27 bp, Unknown
  Description of Unknown: gRNA target site sequence
tttatcctgcaataccatactggcagt

SEQ ID NO: 13620 - DNA, 27 bp, Unknown
  Description of Unknown: gRNA target site sequence
tttgatctttcttctgccatttccaca

SEQ ID NO: 13621 - DNA, 27 bp, Unknown
  Description of Unknown: gRNA target site sequence
tttcttctgccatttccacattggaca

SEQ ID NO: 13622 - DNA, 27 bp, Unknown
  Description of Unknown: gRNA target site sequence
tttccacattggacatctctgctgagg

SEQ ID NO: 13623 - DNA, 27 bp, Unknown
  Description of Unknown: gRNA target site sequence
tttctctcctcagcagagatgtccaat

SEQ ID NO: 13624 - DNA, 27 bp, Unknown
  Description of Unknown: gRNA target site sequence
ttttctctcctcagcagagatgtccaa

SEQ ID NO: 13625 - DNA, 27 bp, Unknown
  Description of Unknown: gRNA target site sequence
ttttcctttgtataatgttgttttatt

SEQ ID NO: 13626 - DNA, 27 bp, Unknown
  Description of Unknown: gRNA target site sequence
tttcctttgtataatgttgttttattc

SEQ ID NO: 13627 - DNA, 27 bp, Unknown
  Description of Unknown: gRNA target site sequence
tttgtataatgttgttttattcttcag

SEQ ID NO: 13628 - DNA, 27 bp, Unknown
  Description of Unknown: gRNA target site sequence
ttttattcttcagacagaagagaggag

SEQ ID NO: 13629 - DNA, 27 bp, Unknown
  Description of Unknown: gRNA target site sequence
tttattcttcagacagaagagaggagt

SEQ ID NO: 13630 - DNA, 27 bp, Unknown
  Description of Unknown: gRNA target site sequence
tttgcctcttagaggttcccaggccac

SEQ ID NO: 13631 - DNA, 27 bp, Unknown
  Description of Unknown: gRNA target site sequence
tttatctcctctagtggcctgggaacc

SEQ ID NO: 13632 - DNA, 27 bp, Unknown
  Description of Unknown: gRNA target site sequence
tttccctttatctcctctagtggcctg

SEQ ID NO: 13633 - DNA, 27 bp, Unknown
  Description of Unknown: gRNA target site sequence
tttggactccaactaaagatgcagaga

SEQ ID NO: 13634 - DNA, 27 bp, Unknown
  Description of Unknown: gRNA target site sequence
tttagttggagtccaaaggcttttcaa

SEQ ID NO: 13635 - DNA, 27 bp, Unknown
  Description of Unknown: gRNA target site sequence
tttcattgaaaagcctttggactccaa

SEQ ID NO: 13636 - DNA, 27 bp, Unknown
  Description of Unknown: gRNA target site sequence
ttttcaatgaaattctactgcccaggg

SEQ ID NO: 13637 - DNA, 27 bp, Unknown
  Description of Unknown: gRNA target site sequence
tttcaatgaaattctactgcccagggt

SEQ ID NO: 13638 - DNA, 27 bp, Unknown
  Description of Unknown: gRNA target site sequence
tttcagcatcaatgtaccctgggcagt

SEQ ID NO: 13639 - DNA, 27 bp, Unknown
  Description of Unknown: gRNA target site sequence
tttgaatggggtttcagcatcaatgta

SEQ ID NO: 13640 - DNA, 27 bp, Unknown
  Description of Unknown: gRNA target site sequence
tttgggagagcatcaggaaggtggatg

SEQ ID NO: 13641 - DNA, 27 bp, Unknown
  Description of Unknown: gRNA target site sequence
tttactaacagtgtgactgggcagatc

SEQ ID NO: 13642 - DNA, 27 bp, Unknown
  Description of Unknown: gRNA target site sequence
tttctcagaacatgtccccgtcattaa

SEQ ID NO: 13643 - DNA, 27 bp, Unknown
  Description of Unknown: gRNA target site sequence
tttgtgtaagcatttctcagaacatgt

SEQ ID NO: 13644 - DNA, 27 bp, Unknown
  Description of Unknown: gRNA target site sequence
tttgtagtctaggagcaataggctata

SEQ ID NO: 13645 - DNA, 27 bp, Unknown
  Description of Unknown: gRNA target site sequence
tttagatacacaaatacttaccattgt

SEQ ID NO: 13646 - DNA, 27 bp, Unknown
  Description of Unknown: gRNA target site sequence
tttgtgtatctaaacatagaagttgca

SEQ ID NO: 13647 - DNA, 27 bp, Unknown
  Description of Unknown: gRNA target site sequence
tttactgcaacttctatgtttagatac

SEQ ID NO: 13648 - DNA, 27 bp, Unknown
  Description of Unknown: gRNA target site sequence
ttttactgcaacttctatgtttagata

SEQ ID NO: 13649 - DNA, 27 bp, Unknown
  Description of Unknown: gRNA target site sequence
tttttactgcaacttctatgtttagat

SEQ ID NO: 13650 - DNA, 27 bp, Unknown
  Description of Unknown: gRNA target site sequence
ttttaatcttatgagaccactgtcata

SEQ ID NO: 13651 - DNA, 27 bp, Unknown
  Description of Unknown: gRNA target site sequence
tttaatcttatgagaccactgtcatat

SEQ ID NO: 13652 - DNA, 27 bp, Unknown
  Description of Unknown: gRNA target site sequence
tttggtcaatgatggactgtatatatg

SEQ ID NO: 13653 - DNA, 27 bp, Unknown
  Description of Unknown: gRNA target site sequence
ttttggtcaatgatggactgtatatat

SEQ ID NO: 13654 - DNA, 27 bp, Unknown
  Description of Unknown: gRNA target site sequence
ttttttcttctaagattttgggagcac

SEQ ID NO: 13655 - DNA, 27 bp, Unknown
  Description of Unknown: gRNA target site sequence
tttttcttctaagattttgggagcacc

SEQ ID NO: 13656 - DNA, 27 bp, Unknown
  Description of Unknown: gRNA target site sequence
ttttcttctaagattttgggagcacca

SEQ ID NO: 13657 - DNA, 27 bp, Unknown
  Description of Unknown: gRNA target site sequence
tttcttctaagattttgggagcaccaa

SEQ ID NO: 13658 - DNA, 27 bp, Unknown
  Description of Unknown: gRNA target site sequence
tttggtgctcccaaaatcttagaagaa

SEQ ID NO: 13659 - DNA, 27 bp, Unknown
  Description of Unknown: gRNA target site sequence
ttttgggagcaccaaagggatacacta

SEQ ID NO: 13660 - DNA, 27 bp, Unknown
  Description of Unknown: gRNA target site sequence
tttgggagcaccaaagggatacactaa

SEQ ID NO: 13661 - DNA, 27 bp, Unknown
  Description of Unknown: gRNA target site sequence
tttataatgggtttggagaactgtctg

SEQ ID NO: 13662 - DNA, 27 bp, Unknown
  Description of Unknown: gRNA target site sequence
tttggagaactgtctgcagctacttct

SEQ ID NO: 13663 - DNA, 27 bp, Unknown
  Description of Unknown: gRNA target site sequence
tttaaaagaagtagctgcagacagttc

SEQ ID NO: 13664 - DNA, 27 bp, Unknown
  Description of Unknown: gRNA target site sequence
ttttaaaagaagtagctgcagacagtt

SEQ ID NO: 13665 - DNA, 27 bp, Unknown
  Description of Unknown: gRNA target site sequence
tttttaaaagaagtagctgcagacagt

SEQ ID NO: 13666 - DNA, 27 bp, Unknown
  Description of Unknown: gRNA target site sequence
ttttaaaaaggtgatctacacagtaga

SEQ ID NO: 13667 - DNA, 27 bp, Unknown
  Description of Unknown: gRNA target site sequence
tttaaaaaggtgatctacacagtagaa

SEQ ID NO: 13668 - DNA, 27 bp, Unknown
  Description of Unknown: gRNA target site sequence
tttctactgtgtagatcacctttttaa

SEQ ID NO: 13669 - DNA, 27 bp, Unknown
  Description of Unknown: gRNA target site sequence
tttggattgcagatctcattaccaaac

SEQ ID NO: 13670 - DNA, 27 bp, Unknown
  Description of Unknown: gRNA target site sequence
tttggtaatgagatctgcaatccaaat

SEQ ID NO: 13671 - DNA, 27 bp, Unknown
  Description of Unknown: gRNA target site sequence
tttatttggattgcagatctcattacc

SEQ ID NO: 13672 - DNA, 27 bp, Unknown
  Description of Unknown: gRNA target site sequence
ttttatttggattgcagatctcattac

SEQ ID NO: 13673 - DNA, 27 bp, Unknown
  Description of Unknown: gRNA target site sequence
tttattttatttggattgcagatctca

SEQ ID NO: 13674 - DNA, 27 bp, Unknown
  Description of Unknown: gRNA target site sequence
tttttcttttcttttcaggtttgaaga

SEQ ID NO: 13675 - DNA, 27 bp, Unknown
  Description of Unknown: gRNA target site sequence
ttttcttttcttttcaggtttgaagat

SEQ ID NO: 13676 - DNA, 27 bp, Unknown
  Description of Unknown: gRNA target site sequence
tttcttttcttttcaggtttgaagatg

SEQ ID NO: 13677 - DNA, 27 bp, Unknown
  Description of Unknown: gRNA target site sequence
ttttcttttcaggtttgaagatgccgc

SEQ ID NO: 13678 - DNA, 27 bp, Unknown
  Description of Unknown: gRNA target site sequence
tttcttttcaggtttgaagatgccgca

SEQ ID NO: 13679 - DNA, 27 bp, Unknown
  Description of Unknown: gRNA target site sequence
ttttcaggtttgaagatgccgcatttg

SEQ ID NO: 13680 - DNA, 27 bp, Unknown
  Description of Unknown: gRNA target site sequence
tttcaggtttgaagatgccgcatttgg

SEQ ID NO: 13681 - DNA, 27 bp, Unknown
  Description of Unknown: gRNA target site sequence
tttgaagatgccgcatttggattggat

SEQ ID NO: 13682 - DNA, 27 bp, Unknown
  Description of Unknown: gRNA target site sequence
tttggaattcatccaatccaaatgcgg

SEQ ID NO: 13683 - DNA, 27 bp, Unknown
  Description of Unknown: gRNA target site sequence
tttggattggatgaattccaaattctg

SEQ ID NO: 13684 - DNA, 27 bp, Unknown
  Description of Unknown: gRNA target site sequence
tttttaatattgatatgcttatacact

SEQ ID NO: 13685 - DNA, 27 bp, Unknown
  Description of Unknown: gRNA target site sequence
ttttaatattgatatgcttatacactt

SEQ ID NO: 13686 - DNA, 27 bp, Unknown
  Description of Unknown: gRNA target site sequence
tttaatattgatatgcttatacactta

SEQ ID NO: 13687 - DNA, 27 bp, Unknown
  Description of Unknown: gRNA target site sequence
tttgtgcataaagtgtaagtgtataag

SEQ ID NO: 13688 - DNA, 27 bp, Unknown
  Description of Unknown: gRNA target site sequence
ttttgtgcataaagtgtaagtgtataa

SEQ ID NO: 13689 - DNA, 27 bp, Unknown
  Description of Unknown: gRNA target site sequence
tttatgcacaaaatgtagggttataat

SEQ ID NO: 13690 - DNA, 27 bp, Unknown
  Description of Unknown: gRNA target site sequence
tttataattctactttgagtgctgtct

SEQ ID NO: 13691 - DNA, 27 bp, Unknown
  Description of Unknown: gRNA target site sequence
tttgagtgctgtctccatgtttgatgt

SEQ ID NO: 13692 - DNA, 27 bp, Unknown
  Description of Unknown: gRNA target site sequence
tttgatgtatctgagcaggttgctcca

SEQ ID NO: 13693 - DNA, 27 bp, Unknown
  Description of Unknown: gRNA target site sequence
tttgaactcttcaatctcttgcactca

SEQ ID NO: 13694 - DNA, 27 bp, Unknown
  Description of Unknown: gRNA target site sequence
tttgagtgcaagagattgaagagttca

SEQ ID NO: 13695 - DNA, 27 bp, Unknown
  Description of Unknown: gRNA target site sequence
tttacatactctgcttagaatttgggg

SEQ ID NO: 13696 - DNA, 27 bp, Unknown
  Description of Unknown: gRNA target site sequence
tttcccccaaattctaagcagagtatg

SEQ ID NO: 13697 - DNA, 27 bp, Unknown
  Description of Unknown: gRNA target site sequence
ttttcccccaaattctaagcagagtat

SEQ ID NO: 13698 - DNA, 27 bp, Unknown
  Description of Unknown: gRNA target site sequence
tttctaaattttcccccaaattctaag

SEQ ID NO: 13699 - DNA, 27 bp, Unknown
  Description of Unknown: gRNA target site sequence
tttgggggaaaatttagaaatataatt

SEQ ID NO: 13700 - DNA, 27 bp, Unknown
  Description of Unknown: gRNA target site sequence
tttagaaatataattgacaggattatt

SEQ ID NO: 13701 - DNA, 27 bp, Unknown
  Description of Unknown: gRNA target site sequence
tttccaataatcctgtcaattatattt

SEQ ID NO: 13702 - DNA, 27 bp, Unknown
  Description of Unknown: gRNA target site sequence
tttcattcattataacaaatttccaat

SEQ ID NO: 13703 - DNA, 27 bp, Unknown
  Description of Unknown: gRNA target site sequence
tttgttataatgaatgaaacattttgt

SEQ ID NO: 13704 - DNA, 27 bp, Unknown
  Description of Unknown: gRNA target site sequence
ttttgtcatataagattcatatttact

SEQ ID NO: 13705 - DNA, 27 bp, Unknown
  Description of Unknown: gRNA target site sequence
tttgtcatataagattcatatttactt

SEQ ID NO: 13706 - DNA, 27 bp, Unknown
  Description of Unknown: gRNA target site sequence
tttatcaaatgtataagaagtaaatat

SEQ ID NO: 13707 - DNA, 27 bp, Unknown
  Description of Unknown: gRNA target site sequence
tttacttcttatacatttgataaagta

SEQ ID NO: 13708 - DNA, 27 bp, Unknown
  Description of Unknown: gRNA target site sequence
tttgataaagtaaggcatggttgtggt

SEQ ID NO: 13709 - DNA, 27 bp, Unknown
  Description of Unknown: gRNA target site sequence
tttaacttgtggaacaaaaataaacca

SEQ ID NO: 13710 - DNA, 27 bp, Unknown
  Description of Unknown: gRNA target site sequence
tttatttttgttccacaagttaaataa

SEQ ID NO: 13711 - DNA, 27 bp, Unknown
  Description of Unknown: gRNA target site sequence
tttatttaacttgtggaacaaaaataa

SEQ ID NO: 13712 - DNA, 27 bp, Unknown
  Description of Unknown: gRNA target site sequence
tttttgttccacaagttaaataaatca

SEQ ID NO: 13713 - DNA, 27 bp, Unknown
  Description of Unknown: gRNA target site sequence
ttttgttccacaagttaaataaatcat

SEQ ID NO: 13714 - DNA, 27 bp, Unknown
  Description of Unknown: gRNA target site sequence
tttgttccacaagttaaataaatcata

SEQ ID NO: 13715 - DNA, 27 bp, Unknown
  Description of Unknown: gRNA target site sequence
tttatgatttatttaacttgtggaaca

SEQ ID NO: 13716 - DNA, 27 bp, Unknown
  Description of Unknown: gRNA target site sequence
ttttatgatttatttaacttgtggaac

SEQ ID NO: 13717 - DNA, 27 bp, Unknown
  Description of Unknown: gRNA target site sequence
tttgaaaataaaggggtaatagtggga

SEQ ID NO: 13718 - DNA, 27 bp, Unknown
  Description of Unknown: gRNA target site sequence
tttccctgtttgaaaataaaggggtaa

SEQ ID NO: 13719 - DNA, 27 bp, Unknown
  Description of Unknown: gRNA target site sequence
tttattttcaaacagggaaacagtctt

SEQ ID NO: 13720 - DNA, 87 bp, Unknown
  Description of Unknown: PD1 gene sequence
gcccggccaggactgccgcttccgtgtcacacaactgcccaacggttggtgtcgtgggcggcctgctgggcagcctggtgctgctag

SEQ ID NO: 13721 - DNA, 74 bp, Unknown
  Description of Unknown: CTLA4 gene sequence
caaggtggagctcatgtacccaccttcggggttgtttttttatagctttctcctcacagctgtttctttgagca

SEQ ID NO: 13722 - DNA, 24 bp, Unknown
  Description of Unknown: gRNA target site sequence
tttaatataagtggaggcgtcgcg

SEQ ID NO: 13723 - DNA, 24 bp, Unknown
  Description of Unknown: gRNA target site sequence
tttctggcctggaggctatccagc

SEQ ID NO: 13724 - DNA, 24 bp, Unknown
  Description of Unknown: gRNA target site sequence
tttaatgttatgaaaaaaatcagg

SEQ ID NO: 13725 - DNA, 24 bp, Artificial Sequence
  Description of Artificial Sequence: Synthetic Cpf1 crRNA primer
gagggcctatttcccatgattcct

SEQ ID NO: 13726 - DNA, 66 bp, Artificial Sequence
  Description of Artificial Sequence: Synthetic Cpf1 crRNA primer
cctttattttagctgaagggaaaatctacaagagtagaaattacggtgtttcgtcctttccacaag

SEQ ID NO: 13727 - DNA, 59 bp, Unknown
  Description of Unknown: B2M target sequence
tggccttagctgtgctcgcgctactctctctttctggcctggaggctatccagcgtgag

SEQ ID NO: 13728 - DNA, 27 bp, Unknown
  Description of Unknown: B2M target sequence
tggccttagctgtgctcgcgctactct

SEQ ID NO: 13729 - DNA, 12 bp, Unknown
  Description of Unknown: B2M target sequence
atccagcgtgag

SEQ ID NO: 13730 - DNA, 27 bp, Unknown
  Description of Unknown: B2M target sequence
tggccttagctgtgctcgcgctactct

SEQ ID NO: 13731 - DNA, 14 bp, Unknown
  Description of Unknown: B2M target sequence
ctatccagcgtgag

SEQ ID NO: 13732 - DNA, 26 bp, Unknown
  Description of Unknown: B2M target sequence
tggccttagctgtgctcgcgctactc

SEQ ID NO: 13733 - DNA, 30 bp, Unknown
  Description of Unknown: B2M target sequence
ctttctggcctggaggctatccagcgtgag

SEQ ID NO: 13734 - DNA, 27 bp, Unknown
  Description of Unknown: B2M target sequence
tggccttagctgtgctcgcgctactct

SEQ ID NO: 13735 - DNA, 24 bp, Unknown
  Description of Unknown: B2M target sequence
ggcctggaggctatccagcgtgag

SEQ ID NO: 13736 - RNA, 13 nt, Artificial Sequence
  Description of Artificial Sequence: Synthetic consensus sequence
gccgccrccaugg
